(19) United States
(12) Patent Application Publication
(10) Pub. No.: US 2009/0306182 A1
(43) Pub. Date: Dec. 10, 2009

(54) RNA INTERFERENCE MEDIATED INHIBITION OF MAP KINASE GENE EXPRESSION USING SHORT INTERFERING NUCLEIC ACID (siNA)

(75) Inventors: James McSwiggen, Boulder, CO (US); Leonid Beigelman, San Mateo, CA (US)

Correspondence Address: Sirna Therapeutics, Inc., 1700 Owens Street, 4th Floor, San Francisco, CA, 94158, US

(73) Assignee: Sirna Therapeutics, Inc., San Francisco, CA (US)

(21) Appl. No.: 12/334,146

(22) Filed: Dec. 12, 2008

Related U.S. Application Data
(63) Continuation of application No. 10/923,379, filed on Aug. 20, 2004, now abandoned.
Application No. 10/923,379 is a continuation-in-part of application No. PCT/US04/12517, filed on Apr. 23, 2004.
Application No. PCT/US04/12517 is a continuation-in-part of application No. 10/424,339, filed on Apr. 25, 2003, now abandoned.
Application No. 10/424,339 is a continuation-in-part of application No. PCT/US03/02510, filed on Jan. 28, 2003.
Application No. 10/923,379 is a continuation-in-part of application No. PCT/US04/16390, filed on May 24, 2004.
Application No. PCT/US04/16390 is a continuation-in-part of application No. 10/826,966, filed on Apr. 16, 2004, now abandoned.
Application No. 10/826,966 is a continuation-in-part of application No. 10/757,803, filed on Jan. 14, 2004.
Application No. 10/757,803 is a continuation-in-part of application No. 10/720,448, filed on Nov. 24, 2003.
Application No. 10/720,448 is a continuation-in-part of application No. 10/693,059, filed on Oct. 23, 2003.
Application No. 10/693,059 is a continuation-in-part of application No. 10/444,853, filed on May 23, 2003.
Application No. 10/444,853 is a continuation-in-part of application No. PCT/US03/05346, filed on Feb. 20, 2003.
Application No. PCT/US03/05346 is a continuation-in-part of application No. PCT/US03/05028, filed on Feb. 20, 2003.
Application No. 10/923,379 is a continuation-in-part of application No. 10/727,780, filed on Dec. 3, 2003, now abandoned.
(60) Provisional application No. 60/358,580, filed on Feb. 20, 2002.
(60) Provisional application No. 60/358,580, filed on Feb. 20, 2002.
(60) Provisional application No. 60/363,124, filed on Mar. 11, 2002.
(60) Provisional application No. 60/363,124, filed on Mar. 11, 2002.
(60) Provisional application No. 60/386,782, filed on Jun. 6, 2002.
(60) Provisional application No. 60/386,782, filed on Jun. 6, 2002.
(60) Provisional application No. 60/406,784, filed on Aug. 29, 2002.
(60) Provisional application No. 60/406,784, filed on Aug. 29, 2002.
(60) Provisional application No. 60/408,378, filed on Sep. 5, 2002.
(60) Provisional application No. 60/408,378, filed on Sep. 5, 2002.
(60) Provisional application No. 60/409,293, filed on Sep. 9, 2002.
(60) Provisional application No. 60/409,293, filed on Sep. 9, 2002.
(60) Provisional application No. 60/440,129, filed on Jan. 15, 2003.
(60) Provisional application No. 60/440,129, filed on Jan. 15, 2003.
(60) Provisional application No. 60/543,480, filed on Feb. 10, 2004.

(51) Int. Cl. A61K 31/7105; C07H 21/02

(52) U.S. Cl. 514/44 A; 536/24.5

(57) ABSTRACT

This invention relates to compounds, compositions, and methods useful for modulating mitogen activated protein kinase (MAP kinase) gene expression using short interfering nucleic acid (siNA) molecules. This invention also relates to compounds, compositions, and methods useful for modulating the expression and activity of other genes involved in pathways of MAP kinase gene expression and/or activity by RNA interference (RNAi) using small nucleic acid molecules. In particular, the instant invention features small nucleic acid molecules, such as short interfering nucleic acid (siNA), short interfering RNA (siRNA), double-stranded RNA (dsRNA), micro-RNA (miRNA), and short hairpin RNA (shRNA) molecules and methods used to modulate the expression of MAP kinase genes, such as Jun amino-terminal kinase (e.g., JNK-1, JNK-2), p38 (MAPK 14), ERK (e.g., ERK-1, ERK-2) and/or c-Jun.

[0001] This application is a continuation application of U.S. patent application Ser. No. 10/923,379, filed Aug. 20, 2004, which is a continuation-in-part of International PCT Application No. PCT/US04/12517, filed Apr. 23, 2004, which is a continuation-in-part of U.S. patent application Ser. No. 10/424,339, filed Apr. 25, 2003, which is a continuation-in-part of International PCT Application No. PCT/US03/02510, filed Jan. 28, 2003. The parent U.S. patent application Ser. No. 10/923,379 is also a continuation-in-part of International Patent Application No. PCT/US04/16390, filed May 24, 2004, which is a continuation-in-part of U.S. patent application Ser. No. 10/826,966, filed Apr. 16, 2004 (now abandoned), which is continuation-in-part of U.S. patent application Ser. No. 10/757,803, filed Jan. 14, 2004, which is a continuation-in-part of U.S. patent application Ser. No. 10/720,448, filed Nov. 24, 2003 (now abandoned), which is a continuation-in-part of U.S. patent application Ser. No. 10/693,059, filed Oct. 23, 2003, which is a continuation-in-part of U.S. patent application Ser. No. 10/444,853, filed May 23, 2003, which is a continuation-in-part of International Patent Application No. PCT/US03/05346, filed Feb. 20, 2003, and a continuation-in-part of International Patent Application No. PCT/US03/05028, filed Feb. 20, 2003, both of which claim the benefit of U.S. Provisional Application No. 60/358,580 filed Feb. 20, 2002, U.S. Provisional Application No. 60/363,124 filed Mar. 11, 2002, U.S. Provisional Application No. 60/386,782 filed Jun. 6, 2002, U.S. Provisional Application No. 60/406,784 filed Aug. 29, 2002, U.S. Provisional Application No. 60/408,378 filed Sep. 5, 2002, U.S. Provisional Application No. 60/409,293 filed Sep. 9, 2002, and U.S. Provisional Application No. 60/440,129 filed Jan. 15, 2003. The parent U.S. patent application Ser. No. 10/923,379 is also a continuation-in-part of U.S. patent application Ser. No. 10/727,780, filed Dec. 3, 2003 (now abandoned), and also claims the benefit of U.S. Provisional Application No. 60/543,480, filed Feb. 10, 2004. The instant application claims the benefit of all the listed applications, which are hereby incorporated by reference herein in their entireties, including the drawings.

### SEQUENCE LISTING

[0002] The sequence listing submitted via EFS, in compliance with 37 CFR § 1.52(e)(5), is incorporated herein by reference. The sequence listing text file submitted via EFS contains the file “SequenceListing45USCNT2”, created on Dec. 12, 2008, which is 958,770 bytes in size.

### FIELD OF THE INVENTION

[0003] The present invention relates to compounds, compositions, and methods for the study, diagnosis, and treatment of traits, diseases and conditions that respond to the modulation of mitogen activated protein kinase (MAP kinase) gene expression and/or activity. The present invention is also directed to compounds, compositions, and methods relating to traits, diseases and conditions that respond to the modulation of expression and/or activity of genes involved in MAP kinase gene expression pathways or other cellular processes that mediate the maintenance or development of such traits, diseases and conditions. Specifically, the invention relates to small nucleic acid molecules, such as short interfering nucleic acid (siNA), short interfering RNA (siRNA), double-stranded RNA (dsRNA), micro-RNA (miRNA), and short hairpin RNA (shRNA) molecules capable of mediating RNA interference (RNAi) against MAP kinase gene expression, such as Jun amino-terminal kinase (e.g., JNK-1, JNK-2), p38 (MAPK 14), ERK (e.g., ERK-1, ERK-2) and/or c-Jun gene expression. Such small nucleic acid molecules are useful, for example, in providing compositions for treatment of traits, diseases and conditions that can respond to modulation of MAP kinase expression in a subject, such as cancer, inflammatory, autoimmune, neuroligic, ocular, respiratory, allergic, and/or proliferative diseases, disorders, and/or conditions.

### BACKGROUND OF THE INVENTION

[0004] The following is a discussion of relevant art pertaining to RNAi. The discussion is provided only for understanding of the invention that follows. The summary is not an admission that any of the work described below is prior art to the claimed invention.

[0005] RNA interference refers to the process of sequence-specific post-transcriptional gene silencing in animals mediated by short interfering RNAs (siRNAs) (Zamore et al., 2000, Cell, 101, 25-33; Fire et al., 1998, Nature, 391, 806; Hamilton et al., 1999, Science, 286, 950-951; Lin et al., 1999, Nature, 402, 128-129; Sharp, 1999, Genes & Dev., 13:139-141; and Strauss, 1999, Science, 286, 886). The corresponding process in plants (Heifetz et al., International PCT Publication No. WO 99/61631) is commonly referred to as post-transcriptional gene silencing or RNA silencing and is also referred to as quelling in fungi. The process of post-transcriptional gene silencing is thought to be an evolutionarily-conserved cellular defense mechanism used to prevent the expression of foreign genes and is commonly shared by diverse flora and phyla (Fire et al., 1999, Trends Genet., 15, 358). Such protection from foreign gene expression may have evolved in response to the production of double-stranded RNAs (dsRNAs) derived from viral infection or from the random integration of transposon elements into a host genome via a cellular response that specifically destroys homologous single-stranded RNA or viral genomic RNA. The presence of dsRNA in cells triggers the RNAi response through a mechanism that has yet to be fully characterized. This mechanism appears to be different from other known mechanisms involving double stranded RNA-specific ribonucleases, such as the interferon response that results from dsRNA-mediated activation of protein kinase PKR and 2′,5′-oligoadenylate synthetase resulting in non-specific cleavage of mRNA by ribonuclease L (see for example U.S. Pat. Nos. 6,107,094; 5,898,031; Clemens et al., 1997, J. Interferon & Cytokine Res., 17, 503-524; Adah et al., 2001, Curr. Med. Chem., 8, 1189).

[0006] The presence of long dsRNAs in cells stimulates the activity of a ribonuclease III enzyme referred to as dicer (Bass, 2000, Cell, 101, 235; Zamore et al., 2000, Cell, 101, 25-33; Hammond et al., 2000, Nature, 404, 293). Dicer is involved in the processing of the dsRNA into short pieces of dsRNA known as short interfering RNAs (siRNAs) (Zamore et al., 2000, Cell, 101, 25-33; Bass, 2000, Cell, 101, 235; Berstein et al., 2001, Nature, 409, 363). Short interfering RNAs derived from dicer activity are typically about 21 to about 23 nucleotides in length and comprise about 19 base pair duplexes (Zamore et al., 2000, Cell, 101, 25-33; Elbashir et al., 2001, Genes Dev., 15, 188). Dicer has also been implicated in the excision of 21- and 22-nucleotide small temporal RNAs (stRNAs) from precursor RNA of conserved structure that are implicated in translational control (Hutvagner et al., 2001, Science, 293, 834). The RNAi response also features an endonuclease complex, commonly referred to as an RNA-induced silencing complex (RISC), which mediates cleavage of single-stranded RNA having sequence complementary to the antisense strand of the siRNA duplex. Cleavage of the target RNA takes place in the middle of the region complementary to the antisense strand of the siRNA duplex (Elbashir et al., 2001, Genes Dev., 15, 188).

[0007] RNAi has been studied in a variety of systems. Fire et al., 1998, Nature, 391, 806, were the first to observe RNAi in C. elegans. Bahramian and Zarbl, 1999, Molecular and Cellular Biology, 19, 274-283 and Wianny and Goetz, 1999, Nature Cell Biol., 2, 70, describe RNAi mediated by dsRNA in mammalian systems. Hammond et al., 2000, Nature, 404, 293, describe RNAi in Drosophila cells transfected with dsRNA. Elbashir et al., 2001, Nature, 411, 494 and Tuschl et al., International PCT Publication No. WO 01/75164, describe RNAi induced by introduction of duplexes of synthetic 21-nucleotide RNAs in cultured mammalian cells including human embryonic kidney and HeLa cells. Recent work in Drosophila embryonic lysates (Elbashir et al., 2001, EMBO J., 20, 6877 and Tuschl et al., International PCT Publication No. WO 01/75164) has revealed certain requirements for siRNA length, structure, chemical composition, and sequence that are essential to mediate efficient RNAi activity. These studies have shown that 21-nucleotide siRNA duplexes are most active when containing 3′-terminal dinucleotide overhangs. Furthermore, complete substitution of one or both siRNA strands with 2′-deoxy (2′-H) or 2′-O-methyl nucleotides abolishes RNAi activity, whereas substitution of the 3′-terminal siRNA overhang nucleotides with 2′-deoxy nucleotides (2′-H) was shown to be tolerated. Single mismatch sequences in the center of the siRNA duplex were also shown to abolish RNAi activity. In addition, these studies also indicate that the position of the cleavage site in the target RNA is defined by the 5′-end of the siRNA guide sequence rather than the 3′-end of the guide sequence (Elbashir et al., 2001, EMBO J., 20, 6877). Other studies have indicated that a 5′-phosphate on the target-complementary strand of a siRNA duplex is required for siRNA activity and that ATP is utilized to maintain the 5′-phosphate moiety on the siRNA (Nykanen et al., 2001, Cell, 107, 309).

[0008] Studies have shown that replacing the 3′-terminal nucleotide overhanging segments of a 21-mer siRNA duplex having two-nucleotide 3′-overhangs with deoxyribonucleotides does not have an adverse effect on RNAi activity. Replacing up to four nucleotides on each end of the siRNA with deoxyribonucleotides has been reported to be well tolerated, whereas complete substitution with deoxyribonucleotides results in no RNAi activity (Elbashir et al., 2001, EMBO J., 20, 6877 and Tuschl et al., International PCT Publication No. WO 01/75164). In addition, Elbashir et al., supra, also report that substitution of siRNA with 2′-O-methyl nucleotides completely abolishes RNAi activity. Li et al., International PCT Publication No. WO 00/44914, and Beach et al., International PCT Publication No. WO 01/68836 preliminarily suggest that siRNA may include modifications to either the phosphate-sugar backbone or the nucleoside to include at least one of a nitrogen or sulfur heteroatom, however, neither application postulates to what extent such modifications would be tolerated in siRNA molecules, nor provides any further guidance or examples of such modified siRNA. Kreutzer et al., Canadian Patent Application No. 2,359,180, also describe certain chemical modifications for use in dsRNA constructs in order to counteract activation of double-stranded RNA-dependent protein kinase PKR, specifically 2′-amino or 2′-methyl nucleotides, and nucleotides containing a 2′-O or 4′-C methylene bridge. However, Kreutzer et al. similarly fails to provide examples or guidance as to what extent these modifications would be tolerated in dsRNA molecules.

[0009] Parrish et al., 2000, Molecular Cell, 6, 1077-1087, tested certain chemical modifications targeting the unc-22 gene in C. elegans using long (>25 nt) siRNA transcripts. The authors describe the introduction of thiophosphate residues into these siRNA transcripts by incorporating thiophosphate nucleotide analogs with T7 and T3 RNA polymerase and observed that RNAs with two phosphorothioate modified bases also had substantial decreases in effectiveness as RNAi. Further, Parrish et al. reported that phosphorothioate modification of more than two residues greatly destabilized the RNAs in vitro such that interference activities could not be assayed. Id. at 1081. The authors also tested certain modifications at the 2′-position of the nucleotide sugar in the long siRNA transcripts and found that substituting deoxynucleotides for ribonucleotides produced a substantial decrease in interference activity, especially in the case of Uridine to Thymidine and/or Cytidine to deoxy-Cytidine substitutions. Id. In addition, the authors tested certain base modifications, including substituting, in sense and antisense strands of the siRNA, 4-thiouracil, 5-bromouracil, 5-iodouracil, and 3-(aminoallyl)uracil for uracil, and inosine for guanosine. Whereas 4-thiouracil and 5-bromouracil substitution appeared to be tolerated, Parrish reported that inosine produced a substantial decrease in interference activity when incorporated in either strand. Parrish also reported that incorporation of 5-iodouracil and 3-(aminoallyl)uracil in the antisense strand resulted in a substantial decrease in RNAi activity as well.

[0010] The use of longer dsRNA has been described. For example, Beach et al., International PCT Publication No. WO 01/68836, describes specific methods for attenuating gene expression using endogenously-derived dsRNA. Tuschl et al., International PCT Publication No. WO 01/75164, describe a Drosophila in vitro RNAi system and the use of specific siRNA molecules for certain functional genomic and certain therapeutic applications; although Tuschl, 2001, Chem. Biochem., 2, 239-245, doubts that RNAi can be used to cure genetic diseases or viral infection due to the danger of activating interferon response. Li et al., International PCT Publication No. WO 00/44914, describe the use of specific long (141 bp-488 bp) enzymatically synthesized or vector expressed dsRNAs for attenuating the expression of certain target genes. Zernicka-Goetz et al., International PCT Publication No. WO 01/36646, describe certain methods for inhibiting the expression of particular genes in mammalian cells using certain long (550 bp-714 bp), enzymatically synthesized or vector expressed dsRNA molecules. Fire et al., International PCT Publication No. WO 99/32619, describe particular methods for introducing certain long dsRNA molecules into cells for use in inhibiting gene expression in nematodes. Plaetinck et al., International PCT Publication No. WO 00/01846, describe certain methods for identifying specific genes responsible for conferring a particular phenotype in a cell using specific long dsRNA molecules. Mello et al., International PCT Publication No. WO 01/29058, describe the identification of specific genes involved in dsRNA-mediated RNAi. Pachuck et al., International PCT Publication No. WO 00/63364, describe certain long (at least 200 nucleotide) dsRNA constructs. Deschamps Depaillette et al., International PCT Publication No. WO 99/07409, describe specific compositions consisting of particular dsRNA molecules combined with certain anti-viral agents. Waterhouse et al., International PCT Publication No. 99/53050 and 1998, PNAS, 95, 13959-13964, describe certain methods for decreasing the phenotypic expression of a nucleic acid in plant cells using certain dsRNAs. Driscoll et al., International PCT Publication No. WO 01/49844, describe specific DNA expression constructs for use in facilitating gene silencing in targeted organisms.

[0011] Others have reported on various RNAi and gene-silencing systems. For example, Parrish et al., 2000, Molecular Cell, 6, 1077-1087, describe specific chemically-modified dsRNA constructs targeting the unc-22 gene of C. elegans. Grossniklaus, International PCT Publication No. WO 01/38551, describes certain methods for regulating polycomb gene expression in plants using certain dsRNAs. Churikov et al., International PCT Publication No. WO 01/42443, describe certain methods for modifying genetic characteristics of an organism using certain dsRNAs. Cogoni et al, International PCT Publication No. WO 01/53475, describe certain methods for isolating a Neurospora silencing gene and uses thereof. Reed et al., International PCT Publication No. WO 01/68836, describe certain methods for gene silencing in plants. Honer et al., International PCT Publication No. WO 01/70944, describe certain methods of drug screening using transgenic nematodes as Parkinson's Disease models using certain dsRNAs. Deak et al., International PCT Publication No. WO 01/72774, describe certain Drosophila-derived gene products that may be related to RNAi in Drosophila. Arndt et al., International PCT Publication No. WO 01/92513 describe certain methods for mediating gene suppression by using factors that enhance RNAi. Tuschl et al., International PCT Publication No. WO 02/44321, describe certain synthetic siRNA constructs. Pachuk et al., International PCT Publication No. WO 00/63364, and Satishchandran et al., International PCT Publication No. WO 01/04313, describe certain methods and compositions for inhibiting the function of certain polynucleotide sequences using certain long (over 250 bp), vector expressed dsRNAs. Echeverri et al., International PCT Publication No. WO 02/38805, describe certain C. elegans genes identified via RNAi. Kreutzer et al., International PCT Publications Nos. WO 02/055692, WO 02/055693, and EP 1144623 B1 describes certain methods for inhibiting gene expression using dsRNA. Graham et al., International PCT Publications Nos. WO 99/49029 and WO 01/70949, and AU 4037501 describe certain vector expressed siRNA molecules. Fire et al., U.S. Pat. No. 6,506,559, describe certain methods for inhibiting gene expression in vitro using certain long dsRNA (299 bp-1033 bp) constructs that mediate RNAi. Martinez et al., 2002, Cell, 110, 563-574, describe certain single stranded siRNA constructs, including certain 5′-phosphorylated single stranded siRNAs that mediate RNA interference in Hela cells. Harborth et al., 2003, Antisense & Nucleic Acid Drug Development, 13, 83-105, describe certain chemically and structurally modified siRNA molecules. Chiu and Rana, 2003, RNA, 9, 1034-1048, describe certain chemically and structurally modified siRNA molecules. Woolf et al., International PCT Publication Nos. WO 03/064626 and WO 03/064625 describe certain chemically modified dsRNA constructs.

### SUMMARY OF THE INVENTION

[0012] This invention relates to compounds, compositions, and methods useful for modulating mitogen activated protein kinase (MAP kinase) gene expression using short interfering nucleic acid (siNA) molecules. This invention also relates to compounds, compositions, and methods useful for modulating the expression and activity of other genes involved in pathways of MAP kinase gene expression and/or activity by RNA interference (RNAi) using small nucleic acid molecules. In particular, the instant invention features small nucleic acid molecules, such as short interfering nucleic acid (siNA), short interfering RNA (siRNA), double-stranded RNA (dsRNA), micro-RNA (miRNA), and short hairpin RNA (shRNA) molecules and methods used to modulate the expression of MAP kinase genes, such as c-JUN, JNK (e.g., JNK1 and JNK2), ERK (e.g., ERK1 and ERK2), and p39 (MAPK3) genes.

[0013] A siNA of the invention can be unmodified or chemically-modified. A siNA of the instant invention can be chemically synthesized, expressed from a vector or enzymatically synthesized. The instant invention also features various chemically-modified synthetic short interfering nucleic acid (siNA) molecules capable of modulating MAP kinase gene expression or activity in cells by RNA interference (RNAi). The use of chemically-modified siNA improves various properties of native siNA molecules through increased resistance to nuclease degradation in vivo and/or through improved cellular uptake. Further, contrary to earlier published studies, siNA having multiple chemical modifications retains its RNAi activity. The siNA molecules of the instant invention provide useful reagents and methods for a variety of therapeutic, veterinary, diagnostic, target validation, genomic discovery, genetic engineering, and pharmacogenomic applications.

[0014] In one embodiment, the invention features one or more siNA molecules and methods that independently or in combination modulate the expression of MAP kinase genes encoding proteins, such as proteins comprising MAP kinase associated with the maintenance and/or development of cancer, inflammatory, autoimmune, neuroligic, ocular, respiratory, allergic, and/or proliferative diseases, traits, conditions and disorders, such as genes encoding sequences comprising those sequences referred to by GenBank Accession Nos. shown in Table I, referred to herein generally as mitogen activated protein kinase or MAP kinase. The description below of the various aspects and embodiments of the invention is provided with reference to exemplary MAP kinase genes, such as JNK1 (also referred to as MAPK8, for example Genbank Accession No. NM_{—}002750), p38 (also referred to as MAPK14, for example Genbank Accession No. NM_{—}139012), ERK2 (also referred to as MAPK1, for example Genbank Accession No. NM_{—}002745), and ERK1 (also referred to as MAPK3, for example Genbank Accession XM_{—}055766) genes. However, the various aspects and embodiments are also directed to other MAP kinases referred to by Accession number in Table 1 and other genes involved in MAP kinase pathways such as those genes encoding c-JUN (for example Genbank Accession No. NM_{—}002228), TNF-alpha (for example Genbank Accession No. M10988), interleukins such as IL-8 (for example Genbank Accession No. M68932), and activating proteins such as AP-1 (for example Genbank Accession No. NM_{—}013277). The various aspects and embodiments are also directed to other MAP kinase genes, such as homolog genes and transcript variants, and polymorphisms (e.g., single nucleotide polymorphism, (SNPs)) associated with certain MAP kinase genes. As such, the various aspects and embodiments are also directed to other genes that are involved in MAP kinase mediated pathways of signal transduction or gene expression that are involved, for example, in the maintenance or development of diseases, traits, or conditions described herein. These additional genes can be analyzed for target sites using the methods described for MAP kinase genes herein. Thus, the modulation of other genes and the effects of such modulation of the other genes can be performed, determined, and measured as described herein.

[0015] In one embodiment, the invention features a double-stranded short interfering nucleic acid (siNA) molecule that down-regulates expression of a MAP kinase gene, wherein said siNA molecule comprises about 15 to about 28 base pairs.

[0016] In one embodiment, the invention features a double stranded short interfering nucleic acid (siNA) molecule that directs cleavage of a MAP kinase RNA via RNA interference (RNAi), wherein the double stranded siNA molecule comprises a first and a second strand, each strand of the siNA molecule is about 18 to about 28 nucleotides in length, the first strand of the siNA molecule comprises nucleotide sequence having sufficient complementarity to the MAP kinase RNA for the siNA molecule to direct cleavage of the MAP kinase RNA via RNA interference, and the second strand of said siNA molecule comprises nucleotide sequence that is complementary to the first strand.

[0017] In one embodiment, the invention features a double stranded short interfering nucleic acid (siNA) molecule that directs cleavage of a MAP kinase RNA via RNA interference (RNAi), wherein the double stranded siNA molecule comprises a first and a second strand, each strand of the siNA molecule is about 18 to about 23 nucleotides in length, the first strand of the siNA molecule comprises nucleotide sequence having sufficient complementarity to the MAP kinase RNA for the siNA molecule to direct cleavage of the MAP kinase RNA via RNA interference, and the second strand of said siNA molecule comprises nucleotide sequence that is complementary to the first strand.

[0018] In one embodiment, the invention features a chemically synthesized double stranded short interfering nucleic acid (siNA) molecule that directs cleavage of a MAP kinase RNA via RNA interference (RNAi), wherein each strand of the siNA molecule is about 18 to about 28 nucleotides in length; and one strand of the siNA molecule comprises nucleotide sequence having sufficient complementarity to the MAP kinase RNA for the siNA molecule to direct cleavage of the MAP kinase RNA via RNA interference.

[0019] In one embodiment, the invention features a chemically synthesized double stranded short interfering nucleic acid (siNA) molecule that directs cleavage of a MAP kinase RNA via RNA interference (RNAi), wherein each strand of the siNA molecule is about 18 to about 23 nucleotides in length; and one strand of the siNA molecule comprises nucleotide sequence having sufficient complementarity to the MAP kinase RNA for the siNA molecule to direct cleavage of the MAP kinase RNA via RNA interference.

[0020] In one embodiment, the invention features a siNA molecule that down-regulates expression of a MAP kinase gene, for example, wherein the MAP kinase gene comprises MAP kinase encoding sequence (e.g., c-JUN, JNK1, JNK2, p38, ERK1, or ERK2). In one embodiment, the invention features a siNA molecule that down-regulates expression of a MAP kinase gene, for example, wherein the MAP kinase gene comprises MAP kinase non-coding sequence or regulatory elements involved in MAP kinase gene expression.

[0021] In one embodiment, a siNA of the invention is used to inhibit the expression of MAP kinase genes or a MAP kinase gene family, wherein the genes or gene family sequences share sequence homology. Such homologous sequences can be identified as is known in the art, for example using sequence alignments. siNA molecules can be designed to target such homologous sequences, for example using perfectly complementary sequences or by incorporating non-canonical base pairs, for example mismatches and/or wobble base pairs, that can provide additional target sequences. In instances where mismatches are identified, non-canonical base pairs (for example, mismatches and/or wobble bases) can be used to generate siNA molecules that target more than one gene sequence. In a non-limiting example, non-canonical base pairs such as UU and CC base pairs are used to generate siNA molecules that are capable of targeting sequences for differing MAP kinase targets that share sequence homology. As such, one advantage of using siNAs of the invention is that a single siNA can be designed to include nucleic acid sequence that is complementary to the nucleotide sequence that is conserved between the homologous genes. In this approach, a single siNA can be used to inhibit expression of more than one gene instead of using more than one siNA molecule to target the different genes.

[0022] In one embodiment, the invention features a siNA molecule having RNAi activity against MAP kinase RNA, wherein the siNA molecule comprises a sequence complementary to any RNA having MAP kinase encoding sequence, such as those sequences having GenBank Accession Nos. shown in Table I. In another embodiment, the invention features a siNA molecule having RNAi activity against MAP kinase RNA, wherein the siNA molecule comprises a sequence complementary to an RNA having variant MAP kinase encoding sequence, for example other mutant MAP kinase genes not shown in Table I but known in the art to be associated with the maintenance and/or development of cancer, inflammatory, autoimmune, neuroligic, ocular, respiratory, allergic, and/or proliferative diseases, disorders, and/or conditions. Chemical modifications as shown in Tables III and IV or otherwise described herein can be applied to any siNA construct of the invention. In another embodiment, a siNA molecule of the invention includes a nucleotide sequence that can interact with nucleotide sequence of a MAP kinase gene and thereby mediate silencing of MAP kinase gene expression, for example, wherein the siNA mediates regulation of MAP kinase gene expression by cellular processes that modulate the chromatin structure or methylation patterns of the MAP kinase gene and prevent transcription of the MAP kinase gene.

[0023] In one embodiment, siNA molecules of the invention are used to down regulate or inhibit the expression of MAP kinase proteins arising from MAP kinase haplotype polymorphisms that are associated with a disease or condition, (e.g., cancer, inflammatory, autoimmune, neuroligic, ocular, respiratory, allergic, and/or proliferative diseases, disorders, and/or conditions). Analysis of MAP kinase genes, or MAP kinase protein or RNA levels can be used to identify subjects with such polymorphisms or those subjects who are at risk of developing traits, conditions, or diseases described herein. These subjects are amenable to treatment, for example, treatment with siNA molecules of the invention and any other composition useful in treating diseases related to MAP kinase gene expression. As such, analysis of MAP kinase protein or RNA levels can be used to determine treatment type and the course of therapy in treating a subject. Monitoring of MAP kinase protein or RNA levels can be used to predict treatment outcome and to determine the efficacy of compounds and compositions that modulate the level and/or activity of certain MAP kinase proteins associated with a trait, condition, or disease.

[0024] In one embodiment of the invention a siNA molecule comprises an antisense strand comprising a nucleotide sequence that is complementary to a nucleotide sequence or a portion thereof encoding a MAP kinase protein. The siNA further comprises a sense strand, wherein said sense strand comprises a nucleotide sequence of a MAP kinase gene or a portion thereof.

[0025] In another embodiment, a siNA molecule comprises an antisense region comprising a nucleotide sequence that is complementary to a nucleotide sequence encoding a MAP kinase protein or a portion thereof. The siNA molecule further comprises a sense region, wherein said sense region comprises a nucleotide sequence of a MAP kinase gene or a portion thereof.

[0026] In another embodiment, the invention features a siNA molecule comprising a nucleotide sequence in the antisense region of the siNA molecule that is complementary to a nucleotide sequence or portion of sequence of a MAP kinase gene. In another embodiment, the invention features a siNA molecule comprising a region, for example, the antisense region of the siNA construct, complementary to a sequence comprising a MAP kinase gene sequence or a portion thereof.

[0027] In one embodiment, the antisense region of MAPK 1 siNA constructs can comprise a sequence complementary to sequence having any of SEQ ID NOs. 1-163 and 1475-1482. The antisense region can also comprise sequence having any of SEQ ID NOs. 164-326, 1543-1550, 1559-1566, 1575-1582, 1591-1598, and 1607-1630. In another embodiment, the sense region of ERK2 siNA constructs can comprise sequence having any of SEQ ID NOs. 1-163, 1475-1482, 1535-1542, 1551-1558, 1567-1574, 1583-1590, 1599-1606.

[0028] In one embodiment, the antisense region of ERK1 (MAPK 3) siNA constructs can comprise a sequence complementary to sequence having any of SEQ ID NOs. 327-431 and 1483-1490. The antisense region can also comprise sequence having any of SEQ ID NOs. 432-536, 1639-1646, 1655-1662, 1671-1678, 1687-1694, and 1703-1726. In another embodiment, the sense region of ERK1 siNA constructs can comprise sequence having any of SEQ ID NOs. 327-431, 1483-1490, 1693-1638, 1647-1654, 663-1670, 1679-1686, and 1695-1702.

[0029] In one embodiment, the antisense region of MAPK 8 siNA constructs can comprise a sequence complementary to sequence having any of SEQ ID NOs. 537-615 and 1491-1498. The antisense region can also comprise sequence having any of SEQ ID NOs. 616-694, 1735-1742, 1751-1758, 1767-1774, 1783-1790, 1799-1824. In another embodiment, the sense region of JNK1 constructs can comprise sequence having any of SEQ ID NOs. 537-615, 1491-1498, 1727-1734, 1743-1750, 1759-1766, 1775-1782, and 1791-1798.

[0030] In one embodiment, the antisense region of p38 (MAPK 14) siNA constructs can comprise a sequence complementary to sequence having any of SEQ ID NOs. 695-903 and 1499-1506. The antisense region can also comprise sequence having any of SEQ ID NOs. 904-1112, 1833-1840, 1849-1856, 1865-1872, 1881-1888, 1897-1920. In another embodiment, the sense region of p38 siNA constructs can comprise sequence having any of SEQ ID NOs. 695-903, 1499-1506, 1825-1832, 1841-1848, 1857-1864, 1873-1880, and 1889-1896.

[0031] In one embodiment, the antisense region of c-JUN siNA constructs can comprise a sequence complementary to sequence having any of SEQ ID NOs. 1113-1293 and 1507-1534. In one embodiment, the antisense region of c-JUN siNA constructs can comprise sequence having any of SEQ ID NOs. 1294-1474, 1949-1976, 2005-2032, 2061-2088, 2117-2144, 2173-2256, 2340, 2342, 2344, 2347, 2349, 2351, 2353, and 2356. In another embodiment, the sense region of c-JUN siNA constructs can comprise sequence having any of SEQ ID NOs. 1113-1293, 1507-1534, 1921-1948, 1977-2004, 2033-2060, 2089-2116, 2146-2172, 2257-2260, 2339, 2341, 2343, 2345, 2346, 2348, 2350, 2351, 2352, 2354, and 2355.

[0032] In one embodiment, a siNA molecule of the invention comprises any of SEQ ID NOs. 1-2356. The sequences shown in SEQ ID NOs: 1-2356 are not limiting. A siNA molecule of the invention can comprise any contiguous MAP kinase sequence (e.g., about 15 to about 25 or more, or about 15, 16, 17, 18, 19, 20, 21, 22, 23, 24, or 25 or more contiguous MAP kinase nucleotides).

[0033] In yet another embodiment, the invention features a siNA molecule comprising a sequence, for example, the antisense sequence of the siNA construct, complementary to a sequence or portion of sequence comprising sequence represented by GenBank Accession Nos. shown in Table I. Chemical modifications in Tables III and IV and described herein can be applied to any siNA construct of the invention.

[0034] In one embodiment of the invention a siNA molecule comprises an antisense strand having about 15 to about 30 (e.g., about 15, 16, 17, 18, 19, 20, 21, 22, 23, 24, 25, 26, 27, 28, 29, or 30) nucleotides, wherein the antisense strand is complementary to a RNA sequence or a portion thereof encoding a MAP kinase protein, and wherein said siNA further comprises a sense strand having about 15 to about 30 (e.g., about 15, 16, 17, 18, 19, 20, 21, 22, 23, 24, 25, 26, 27, 28, 29, or 30) nucleotides, and wherein said sense strand and said antisense strand are distinct nucleotide sequences where at least about 15 nucleotides in each strand are complementary to the other strand.

[0035] In another embodiment of the invention a siNA molecule of the invention comprises an antisense region having about 15 to about 30 (e.g., about 15, 16, 17, 18, 19, 20, 21, 22, 23, 24, 25, 26, 27, 28, 29, or 30) nucleotides, wherein the antisense region is complementary to a RNA sequence encoding a MAP kinase protein, and wherein said siNA further comprises a sense region having about 15 to about 30 (e.g., about 15, 16, 17, 18, 19, 20, 21, 22, 23, 24, 25, 26, 27, 28, 29, or 30) nucleotides, wherein said sense region and said antisense region are comprised in a linear molecule where the sense region comprises at least about 15 nucleotides that are complementary to the antisense region.

[0036] In one embodiment, a siNA molecule of the invention has RNAi activity that modulates expression of RNA encoded by a MAP kinase gene. Because MAP kinase genes can share some degree of sequence homology with each other, siNA molecules can be designed to target a class of MAP kinase genes or alternately specific MAP kinase genes (e.g., polymorphic variants) by selecting sequences that are either shared amongst different MAP kinase targets or alternatively that are unique for a specific MAP kinase target. Therefore, in one embodiment, the siNA molecule can be designed to target conserved regions of MAP kinase RNA sequences having homology among several MAP kinase gene variants so as to target a class of MAP kinase genes with one siNA molecule. Accordingly, in one embodiment, the siNA molecule of the invention modulates the expression of one or both MAP kinase alleles in a subject. In another embodiment, the siNA molecule can be designed to target a sequence that is unique to a specific MAP kinase RNA sequence (e.g., a single MAP kinase allele or MAP kinase single nucleotide polymorphism (SNP)) due to the high degree of specificity that the siNA molecule requires to mediate RNAi activity.

[0037] In one embodiment, nucleic acid molecules of the invention that act as mediators of the RNA interference gene silencing response are double-stranded nucleic acid molecules. In another embodiment, the siNA molecules of the invention consist of duplex nucleic acid molecules containing about 15 to about 30 base pairs between oligonucleotides comprising about 15 to about 30 (e.g., about 15, 16, 17, 18, 19, 20, 21, 22, 23, 24, 25, 26, 27, 28, 29, or 30) nucleotides. In yet another embodiment, siNA molecules of the invention comprise duplex nucleic acid molecules with overhanging ends of about 1 to about 3 (e.g., about 1, 2, or 3) nucleotides, for example, about 21-nucleotide duplexes with about 19 base pairs and 3′-terminal mononucleotide, dinucleotide, or trinucleotide overhangs. In yet another embodiment, siNA molecules of the invention comprise duplex nucleic acid molecules with blunt ends, where both ends are blunt, or alternatively, where one of the ends is blunt.

[0038] In one embodiment, the invention features one or more chemically-modified siNA constructs having specificity for MAP kinase expressing nucleic acid molecules, such as RNA encoding a MAP kinase protein. In one embodiment, the invention features a RNA based siNA molecule (e.g., a siNA comprising 2′-OH nucleotides) having specificity for MAP kinase expressing nucleic acid molecules that includes one or more chemical modifications described herein. Non-limiting examples of such chemical modifications include without limitation phosphorothioate internucleotide linkages, 2′-deoxyribonucleotides, 2′-O-methyl ribonucleotides, 2′-deoxy-2′-fluoro ribonucleotides, “universal base” nucleotides, “acyclic” nucleotides, 5-C-methyl nucleotides, and terminal glyceryl and/or inverted deoxy abasic residue incorporation. These chemical modifications, when used in various siNA constructs, (e.g., RNA based siNA constructs), are shown to preserve RNAi activity in cells while at the same time, dramatically increasing the serum stability of these compounds. Furthermore, contrary to the data published by Parrish et al., supra, applicant demonstrates that multiple (greater than one) phosphorothioate substitutions are well-tolerated and confer substantial increases in serum stability for modified siNA constructs.

[0039] In one embodiment, a siNA molecule of the invention comprises modified nucleotides while maintaining the ability to mediate RNAi. The modified nucleotides can be used to improve in vitro or in vivo characteristics such as stability, activity, and/or bioavailability. For example, a siNA molecule of the invention can comprise modified nucleotides as a percentage of the total number of nucleotides present in the siNA molecule. As such, a siNA molecule of the invention can generally comprise about 5% to about 100% modified nucleotides (e.g., about 5%, 10%, 15%, 20%, 25%, 30%, 35%, 40%, 45%, 50%, 55%, 60%, 65%, 70%, 75%, 80%, 85%, 90%, 95% or 100% modified nucleotides). The actual percentage of modified nucleotides present in a given siNA molecule will depend on the total number of nucleotides present in the siNA. If the siNA molecule is single stranded, the percent modification can be based upon the total number of nucleotides present in the single stranded siNA molecules. Likewise, if the siNA molecule is double stranded, the percent modification can be based upon the total number of nucleotides present in the sense strand, antisense strand, or both the sense and antisense strands.

[0040] One aspect of the invention features a double-stranded short interfering nucleic acid (siNA) molecule that down-regulates expression of a MAP kinase gene. In one embodiment, the double stranded siNA molecule comprises one or more chemical modifications and each strand of the double-stranded siNA is about 21 nucleotides long. In one embodiment, the double-stranded siNA molecule does not contain any ribonucleotides. In another embodiment, the double-stranded siNA molecule comprises one or more ribonucleotides. In one embodiment, each strand of the double-stranded siNA molecule independently comprises about 15 to about 30 (e.g., about 15, 16, 17, 18, 19, 20, 21, 22, 23, 24, 25, 26, 27, 28, 29, or 30) nucleotides, wherein each strand comprises about 15 to about 30 (e.g., about 15, 16, 17, 18, 19, 20, 21, 22, 23, 24, 25, 26, 27, 28, 29, or 30) nucleotides that are complementary to the nucleotides of the other strand. In one embodiment, one of the strands of the double-stranded siNA molecule comprises a nucleotide sequence that is complementary to a nucleotide sequence or a portion thereof of the MAP kinase gene, and the second strand of the double-stranded siNA molecule comprises a nucleotide sequence substantially similar to the nucleotide sequence of the MAP kinase gene or a portion thereof.

[0041] In another embodiment, the invention features a double-stranded short interfering nucleic acid (siNA) molecule that down-regulates expression of a MAP kinase gene comprising an antisense region, wherein the antisense region comprises a nucleotide sequence that is complementary to a nucleotide sequence of the MAP kinase gene or a portion thereof, and a sense region, wherein the sense region comprises a nucleotide sequence substantially similar to the nucleotide sequence of the MAP kinase gene or a portion thereof. In one embodiment, the antisense region and the sense region independently comprise about 15 to about 30 (e.g. about 15, 16, 17, 18, 19, 20, 21, 22, 23, 24, 25, 26, 27, 28, 29, or 30) nucleotides, wherein the antisense region comprises about 15 to about 30 (e.g. about 15, 16, 17, 18, 19, 20, 21, 22, 23, 24, 25, 26, 27, 28, 29, or 30) nucleotides that are complementary to nucleotides of the sense region.

[0042] In another embodiment, the invention features a double-stranded short interfering nucleic acid (siNA) molecule that down-regulates expression of a MAP kinase gene comprising a sense region and an antisense region, wherein the antisense region comprises a nucleotide sequence that is complementary to a nucleotide sequence of RNA encoded by the MAP kinase gene or a portion thereof and the sense region comprises a nucleotide sequence that is complementary to the antisense region.

[0043] In one embodiment, a siNA molecule of the invention comprises blunt ends, i.e., ends that do not include any overhanging nucleotides. For example, a siNA molecule comprising modifications described herein (e.g., comprising nucleotides having Formulae I-VII or siNA constructs comprising “Stab 00”-“Stab 32” (Table IV) or any combination thereof (see Table IV)) and/or any length described herein can comprise blunt ends or ends with no overhanging nucleotides.

[0044] In one embodiment, any siNA molecule of the invention can comprise one or more blunt ends, i.e. where a blunt end does not have any overhanging nucleotides. In one embodiment, the blunt ended siNA molecule has a number of base pairs equal to the number of nucleotides present in each strand of the siNA molecule. In another embodiment, the siNA molecule comprises one blunt end, for example wherein the 5′-end of the antisense strand and the 3′-end of the sense strand do not have any overhanging nucleotides. In another example, the siNA molecule comprises one blunt end, for example wherein the 3′-end of the antisense strand and the 5′-end of the sense strand do not have any overhanging nucleotides. In another example, a siNA molecule comprises two blunt ends, for example wherein the 3′-end of the antisense strand and the 5′-end of the sense strand as well as the 5′-end of the antisense strand and 3′-end of the sense strand do not have any overhanging nucleotides. A blunt ended siNA molecule can comprise, for example, from about 15 to about 30 nucleotides (e.g., about 15, 16, 17, 18, 19, 20, 21, 22, 23, 24, 25, 26, 27, 28, 29, or 30 nucleotides). Other nucleotides present in a blunt ended siNA molecule can comprise, for example, mismatches, bulges, loops, or wobble base pairs to modulate the activity of the siNA molecule to mediate RNA interference.

[0045] By “blunt ends” is meant symmetric termini or termini of a double stranded siNA molecule having no overhanging nucleotides. The two strands of a double stranded siNA molecule align with each other without over-hanging nucleotides at the termini. For example, a blunt ended siNA construct comprises terminal nucleotides that are complementary between the sense and antisense regions of the siNA molecule.

[0046] In one embodiment, the invention features a double-stranded short interfering nucleic acid (siNA) molecule that down-regulates expression of a MAP kinase gene, wherein the siNA molecule is assembled from two separate oligonucleotide fragments wherein one fragment comprises the sense region and the second fragment comprises the antisense region of the siNA molecule. The sense region can be connected to the antisense region via a linker molecule, such as a polynucleotide linker or a non-nucleotide linker.

[0047] In one embodiment, the invention features double-stranded short interfering nucleic acid (siNA) molecule that down-regulates expression of a MAP kinase gene, wherein the siNA molecule comprises about 15 to about 30 (e.g. about 15, 16, 17, 18, 19, 20, 21, 22, 23, 24, 25, 26, 27, 28, 29, or 30) base pairs, and wherein each strand of the siNA molecule comprises one or more chemical modifications. In another embodiment, one of the strands of the double-stranded siNA molecule comprises a nucleotide sequence that is complementary to a nucleotide sequence of a MAP kinase gene or a portion thereof, and the second strand of the double-stranded siNA molecule comprises a nucleotide sequence substantially similar to the nucleotide sequence or a portion thereof of the MAP kinase gene. In another embodiment, one of the strands of the double-stranded siNA molecule comprises a nucleotide sequence that is complementary to a nucleotide sequence of a MAP kinase gene or portion thereof, and the second strand of the double-stranded siNA molecule comprises a nucleotide sequence substantially similar to the nucleotide sequence or portion thereof of the MAP kinase gene. In another embodiment, each strand of the siNA molecule comprises about 15 to about 30 (e.g. about 15, 16, 17, 18, 19, 20, 21, 22, 23, 24, 25, 26, 27, 28, 29, or 30) nucleotides, and each strand comprises at least about 15 to about 30 (e.g. about 15, 16, 17, 18, 19, 20, 21, 22, 23, 24, 25, 26, 27, 28, 29, or 30) nucleotides that are complementary to the nucleotides of the other strand. The MAP kinase gene can comprise, for example, sequences referred to in Table I.

[0048] In one embodiment, a siNA molecule of the invention comprises no ribonucleotides. In another embodiment, a siNA molecule of the invention comprises ribonucleotides.

[0049] In one embodiment, a siNA molecule of the invention comprises an antisense region comprising a nucleotide sequence that is complementary to a nucleotide sequence of a MAP kinase gene or a portion thereof, and the siNA further comprises a sense region comprising a nucleotide sequence substantially similar to the nucleotide sequence of the MAP kinase gene or a portion thereof. In another embodiment, the antisense region and the sense region each comprise about 15 to about 30 (e.g. about 15, 16, 17, 18, 19, 20, 21, 22, 23, 24, 25, 26, 27, 28, 29, or 30) nucleotides and the antisense region comprises at least about 15 to about 30 (e.g. about 15, 16, 17, 18, 19, 20, 21, 22, 23, 24, 25, 26, 27, 28, 29, or 30) nucleotides that are complementary to nucleotides of the sense region. The MAP kinase gene can comprise, for example, sequences referred to in Table I. In another embodiment, the siNA is a double stranded nucleic acid molecule, where each of the two strands of the siNA molecule independently comprise about 15 to about 40 (e.g. about 15, 16, 17, 18, 19, 20, 21, 22, 23, 24, 25, 26, 27, 28, 29, 30, 31, 23, 33, 34, 35, 36, 37, 38, 39, or 40) nucleotides, and where one of the strands of the siNA molecule comprises at least about 15 (e.g. about 15, 16, 17, 18, 19, 20, 21, 22, 23, 24 or 25 or more) nucleotides that are complementary to the nucleic acid sequence of the MAP kinase gene or a portion thereof.

[0050] In one embodiment, a siNA molecule of the invention comprises a sense region and an antisense region, wherein the antisense region comprises a nucleotide sequence that is complementary to a nucleotide sequence of RNA encoded by a MAP kinase gene, or a portion thereof, and the sense region comprises a nucleotide sequence that is complementary to the antisense region. In one embodiment, the siNA molecule is assembled from two separate oligonucleotide fragments, wherein one fragment comprises the sense region and the second fragment comprises the antisense region of the siNA molecule. In another embodiment, the sense region is connected to the antisense region via a linker molecule. In another embodiment, the sense region is connected to the antisense region via a linker molecule, such as a nucleotide or non-nucleotide linker. The MAP kinase gene can comprise, for example, sequences referred in to Table I.

[0051] In one embodiment, the invention features a double-stranded short interfering nucleic acid (siNA) molecule that down-regulates expression of a MAP kinase gene comprising a sense region and an antisense region, wherein the antisense region comprises a nucleotide sequence that is complementary to a nucleotide sequence of RNA encoded by the MAP kinase gene or a portion thereof and the sense region comprises a nucleotide sequence that is complementary to the antisense region, and wherein the siNA molecule has one or more modified pyrimidine and/or purine nucleotides. In one embodiment, the pyrimidine nucleotides in the sense region are 2′-O-methylpyrimidine nucleotides or 2′-deoxy-2′-fluoro pyrimidine nucleotides and the purine nucleotides present in the sense region are 2′-deoxy purine nucleotides. In another embodiment, the pyrimidine nucleotides in the sense region are 2′-deoxy-2′-fluoro pyrimidine nucleotides and the purine nucleotides present in the sense region are 2′-O-methyl purine nucleotides.

[0052] In another embodiment, the pyrimidine nucleotides in the sense region are 2′-deoxy-2′-fluoro pyrimidine nucleotides and the purine nucleotides present in the sense region are 2′-deoxy purine nucleotides. In one embodiment, the pyrimidine nucleotides in the antisense region are 2′-deoxy-2′-fluoro pyrimidine nucleotides and the purine nucleotides present in the antisense region are 2′-O-methyl or 2′-deoxy purine nucleotides. In another embodiment of any of the above-described siNA molecules, any nucleotides present in a non-complementary region of the sense strand (e.g. overhang region) are 2′-deoxy nucleotides.

[0053] In one embodiment, the invention features a double-stranded short interfering nucleic acid (siNA) molecule that down-regulates expression of a MAP kinase gene, wherein the siNA molecule is assembled from two separate oligonucleotide fragments wherein one fragment comprises the sense region and the second fragment comprises the antisense region of the siNA molecule, and wherein the fragment comprising the sense region includes a terminal cap moiety at the 5′-end, the 3′-end, or both of the 5′ and 3′ ends of the fragment. In one embodiment, the terminal cap moiety is an inverted deoxy abasic moiety or glyceryl moiety. In one embodiment, each of the two fragments of the siNA molecule independently comprise about 15 to about 30 (e.g. about 15, 16, 17, 18, 19, 20, 21, 22, 23, 24, 25, 26, 27, 28, 29, or 30) nucleotides. In another embodiment, each of the two fragments of the siNA molecule independently comprise about 15 to about 40 (e.g. about 15, 16, 17, 18, 19, 20, 21, 22, 23, 24, 25, 26, 27, 28, 29, 30, 31, 23, 33, 34, 35, 36, 37, 38, 39, or 40) nucleotides. In a non-limiting example, each of the two fragments of the siNA molecule comprise about 21 nucleotides.

[0054] In one embodiment, the invention features a siNA molecule comprising at least one modified nucleotide, wherein the modified nucleotide is a 2′-deoxy-2′-fluoro nucleotide. The siNA can be, for example, about 15 to about 40 nucleotides in length. In one embodiment, all pyrimidine nucleotides present in the siNA are 2′-deoxy-2′-fluoro pyrimidine nucleotides. In one embodiment, the modified nucleotides in the siNA include at least one 2′-deoxy-2′-fluoro cytidine or 2′-deoxy-2′-fluoro uridine nucleotide. In another embodiment, the modified nucleotides in the siNA include at least one 2′-fluoro cytidine and at least one 2′-deoxy-2′-fluoro uridine nucleotides. In one embodiment, all uridine nucleotides present in the siNA are 2′-deoxy-2′-fluoro uridine nucleotides. In one embodiment, all cytidine nucleotides present in the siNA are 2′-deoxy-2′-fluoro cytidine nucleotides. In one embodiment, all adenosine nucleotides present in the siNA are 2′-deoxy-2′-fluoro adenosine nucleotides. In one embodiment, all guanosine nucleotides present in the siNA are 2′-deoxy-2′-fluoro guanosine nucleotides. The siNA can further comprise at least one modified internucleotidic linkage, such as phosphorothioate linkage. In one embodiment, the 2′-deoxy-2′-fluoronucleotides are present at specifically selected locations in the siNA that are sensitive to cleavage by ribonucleases, such as locations having pyrimidine nucleotides.

[0055] In one embodiment, the invention features a method of increasing the stability of a siNA molecule against cleavage by ribonucleases comprising introducing at least one modified nucleotide into the siNA molecule, wherein the modified nucleotide is a 2′-deoxy-2′-fluoro nucleotide. In one embodiment, all pyrimidine nucleotides present in the siNA are 2′-deoxy-2′-fluoro pyrimidine nucleotides. In one embodiment, the modified nucleotides in the siNA include at least one 2′-deoxy-2′-fluoro cytidine or 2′-deoxy-2′-fluoro uridine nucleotide. In another embodiment, the modified nucleotides in the siNA include at least one 2′-fluoro cytidine and at least one 2′-deoxy-2′-fluoro uridine nucleotides. In one embodiment, all uridine nucleotides present in the siNA are 2′-deoxy-2′-fluoro uridine nucleotides. In one embodiment, all cytidine nucleotides present in the siNA are 2′-deoxy-2′-fluoro cytidine nucleotides. In one embodiment, all adenosine nucleotides present in the siNA are 2′-deoxy-2′-fluoro adenosine nucleotides. In one embodiment, all guanosine nucleotides present in the siNA are 2′-deoxy-2′-fluoro guanosine nucleotides. The siNA can further comprise at least one modified internucleotidic linkage, such as phosphorothioate linkage. In one embodiment, the 2′-deoxy-2′-fluoronucleotides are present at specifically selected locations in the siNA that are sensitive to cleavage by ribonucleases, such as locations having pyrimidine nucleotides.

[0056] In one embodiment, the invention features a double-stranded short interfering nucleic acid (siNA) molecule that down-regulates expression of a MAP kinase gene comprising a sense region and an antisense region, wherein the antisense region comprises a nucleotide sequence that is complementary to a nucleotide sequence of RNA encoded by the MAP kinase gene or a portion thereof and the sense region comprises a nucleotide sequence that is complementary to the antisense region, and wherein the purine nucleotides present in the antisense region comprise 2′-deoxy- purine nucleotides. In an alternative embodiment, the purine nucleotides present in the antisense region comprise 2′-O-methyl purine nucleotides. In either of the above embodiments, the antisense region can comprise a phosphorothioate internucleotide linkage at the 3′ end of the antisense region. Alternatively, in either of the above embodiments, the antisense region can comprise a glyceryl modification at the 3′ end of the antisense region. In another embodiment of any of the above-described siNA molecules, any nucleotides present in a non-complementary region of the antisense strand (e.g. overhang region) are 2′-deoxy nucleotides.

[0057] In one embodiment, the antisense region of a siNA molecule of the invention comprises sequence complementary to a portion of a MAP kinase transcript having sequence unique to a particular MAP kinase disease related allele, such as sequence comprising a single nucleotide polymorphism (SNP) associated with the disease specific allele. As such, the antisense region of a siNA molecule of the invention can comprise sequence complementary to sequences that are unique to a particular allele to provide specificity in mediating selective RNAi against the disease, condition, or trait related allele.

[0058] In one embodiment, the invention features a double-stranded short interfering nucleic acid (siNA) molecule that down-regulates expression of a MAP kinase gene, wherein the siNA molecule is assembled from two separate oligonucleotide fragments wherein one fragment comprises the sense region and the second fragment comprises the antisense region of the siNA molecule. In another embodiment, the siNA molecule is a double stranded nucleic acid molecule, where each strand is about 21 nucleotides long and where about 19 nucleotides of each fragment of the siNA molecule are base-paired to the complementary nucleotides of the other fragment of the siNA molecule, wherein at least two 3′ terminal nucleotides of each fragment of the siNA molecule are not base-paired to the nucleotides of the other fragment of the siNA molecule. In another embodiment, the siNA molecule is a double stranded nucleic acid molecule, where each strand is about 19 nucleotide long and where the nucleotides of each fragment of the siNA molecule are base-paired to the complementary nucleotides of the other fragment of the siNA molecule to form at least about 15 (e.g., 15, 16, 17, 18, or 19) base pairs, wherein one or both ends of the siNA molecule are blunt ends. In one embodiment, each of the two 3′ terminal nucleotides of each fragment of the siNA molecule is a 2′-deoxy-pyrimidine nucleotide, such as a 2′-deoxy-thymidine. In another embodiment, all nucleotides of each fragment of the siNA molecule are base-paired to the complementary nucleotides of the other fragment of the siNA molecule. In another embodiment, the siNA molecule is a double stranded nucleic acid molecule of about 19 to about 25 base pairs having a sense region and an antisense region, where about 19 nucleotides of the antisense region are base-paired to the nucleotide sequence or a portion thereof of the RNA encoded by the MAP kinase gene. In another embodiment, about 21 nucleotides of the antisense region are base-paired to the nucleotide sequence or a portion thereof of the RNA encoded by the MAP kinase gene. In any of the above embodiments, the 5′-end of the fragment comprising said antisense region can optionally include a phosphate group.

[0059] In one embodiment, the invention features a double-stranded short interfering nucleic acid (siNA) molecule that inhibits the expression of a MAP kinase RNA sequence (e.g., wherein said target RNA sequence is encoded by a MAP kinase gene involved in the MAP kinase pathway), wherein the siNA molecule does not contain any ribonucleotides and wherein each strand of the double-stranded siNA molecule is about 15 to about 30 nucleotides. In one embodiment, the siNA molecule is 21 nucleotides in length. Examples of non-ribonucleotide containing siNA constructs are combinations of stabilization chemistries shown in Table IV in any combination of Sense/Antisense chemistries, such as Stab 7/8, Stab 7/11, Stab 8/8, Stab 18/8, Stab 18/11, Stab 12/13, Stab 7/13, Stab 18/13, Stab 7/19, Stab 8/19, Stab 18/19, Stab 7/20, Stab 8/20, Stab 18/20, Stab 7/32, Stab 8/32, or Stab 18/32 (e.g., any siNA having Stab 7, 8, 11, 12, 13, 14, 15, 17, 18, 19, 20, or 32 sense or antisense strands or any combination thereof).

[0060] In one embodiment, the invention features a chemically synthesized double stranded RNA molecule that directs cleavage of a MAP kinase RNA via RNA interference, wherein each strand of said RNA molecule is about 15 to about 30 nucleotides in length; one strand of the RNA molecule comprises nucleotide sequence having sufficient complementarity to the MAP kinase RNA for the RNA molecule to direct cleavage of the MAP kinase RNA via RNA interference; and wherein at least one strand of the RNA molecule optionally comprises one or more chemically modified nucleotides described herein, such as without limitation deoxynucleotides, 2′-O-methyl nucleotides, 2′-deoxy-2′-fluoro nucleotides, 2′-O-methoxyethyl nucleotides etc.

[0061] In one embodiment, the invention features a medicament comprising a siNA molecule of the invention.

[0062] In one embodiment, the invention features an active ingredient comprising a siNA molecule of the invention.

[0063] In one embodiment, the invention features the use of a double-stranded short interfering nucleic acid (siNA) molecule to inhibit, down-regulate, or reduce expression of a MAP kinase gene, wherein the siNA molecule comprises one or more chemical modifications and each strand of the double-stranded siNA is independently about 15 to about 30 or more (e.g., about 15, 16, 17, 18, 19, 20, 21, 22, 23, 24, 25, 26, 27, 28, 29 or 30 or more) nucleotides long. In one embodiment, the siNA molecule of the invention is a double stranded nucleic acid molecule comprising one or more chemical modifications, where each of the two fragments of the siNA molecule independently comprise about 15 to about 40 (e.g. about 15, 16, 17, 18, 19, 20, 21, 22, 23, 24, 25, 26, 27, 28, 29, 30, 31, 23, 33, 34, 35, 36, 37, 38, 39, or 40) nucleotides and where one of the strands comprises at least 15 nucleotides that are complementary to nucleotide sequence of MAP kinase encoding RNA or a portion thereof. In a non-limiting example, each of the two fragments of the siNA molecule comprise about 21 nucleotides. In another embodiment, the siNA molecule is a double stranded nucleic acid molecule comprising one or more chemical modifications, where each strand is about 21 nucleotide long and where about 19 nucleotides of each fragment of the siNA molecule are base-paired to the complementary nucleotides of the other fragment of the siNA molecule, wherein at least two 3′ terminal nucleotides of each fragment of the siNA molecule are not base-paired to the nucleotides of the other fragment of the siNA molecule. In another embodiment, the siNA molecule is a double stranded nucleic acid molecule comprising one or more chemical modifications, where each strand is about 19 nucleotide long and where the nucleotides of each fragment of the siNA molecule are base-paired to the complementary nucleotides of the other fragment of the siNA molecule to form at least about 15 (e.g., 15, 16, 17, 18, or 19) base pairs, wherein one or both ends of the siNA molecule are blunt ends. In one embodiment, each of the two 3′ terminal nucleotides of each fragment of the siNA molecule is a 2′-deoxy-pyrimidine nucleotide, such as a 2′-deoxy-thymidine. In another embodiment, all nucleotides of each fragment of the siNA molecule are base-paired to the complementary nucleotides of the other fragment of the siNA molecule. In another embodiment, the siNA molecule is a double stranded nucleic acid molecule of about 19 to about 25 base pairs having a sense region and an antisense region and comprising one or more chemical modifications, where about 19 nucleotides of the antisense region are base-paired to the nucleotide sequence or a portion thereof of the RNA encoded by the MAP kinase gene. In another embodiment, about 21 nucleotides of the antisense region are base-paired to the nucleotide sequence or a portion thereof of the RNA encoded by the MAP kinase gene. In any of the above embodiments, the 5′-end of the fragment comprising said antisense region can optionally include a phosphate group.

[0064] In one embodiment, the invention features the use of a double-stranded short interfering nucleic acid (siNA) molecule that inhibits, down-regulates, or reduces expression of a MAP kinase gene, wherein one of the strands of the double-stranded siNA molecule is an antisense strand which comprises nucleotide sequence that is complementary to nucleotide sequence of MAP kinase RNA or a portion thereof, the other strand is a sense strand which comprises nucleotide sequence that is complementary to a nucleotide sequence of the antisense strand and wherein a majority of the pyrimidine nucleotides present in the double-stranded siNA molecule comprises a sugar modification.

[0065] In one embodiment, the invention features a double-stranded short interfering nucleic acid (siNA) molecule that inhibits, down-regulates, or reduces expression of a MAP kinase gene, wherein one of the strands of the double-stranded siNA molecule is an antisense strand which comprises nucleotide sequence that is complementary to nucleotide sequence of MAP kinase RNA or a portion thereof, wherein the other strand is a sense strand which comprises nucleotide sequence that is complementary to a nucleotide sequence of the antisense strand and wherein a majority of the pyrimidine nucleotides present in the double-stranded siNA molecule comprises a sugar modification.

[0066] In one embodiment, the invention features a double-stranded short interfering nucleic acid (siNA) molecule that inhibits, down-regulates, or reduces expression of a MAP kinase gene, wherein one of the strands of the double-stranded siNA molecule is an antisense strand which comprises nucleotide sequence that is complementary to nucleotide sequence of MAP kinase RNA that encodes a protein or portion thereof, the other strand is a sense strand which comprises nucleotide sequence that is complementary to a nucleotide sequence of the antisense strand and wherein a majority of the pyrimidine nucleotides present in the double-stranded siNA molecule comprises a sugar modification. In one embodiment, each strand of the siNA molecule comprises about 15 to about 30 or more (e.g., about 15, 16, 17, 18, 19, 20, 21, 22, 23, 24, 25, 26, 27, 28, 29, or 30 or more) nucleotides, wherein each strand comprises at least about 15 nucleotides that are complementary to the nucleotides of the other strand. In one embodiment, the siNA molecule is assembled from two oligonucleotide fragments, wherein one fragment comprises the nucleotide sequence of the antisense strand of the siNA molecule and a second fragment comprises nucleotide sequence of the sense region of the siNA molecule. In one embodiment, the sense strand is connected to the antisense strand via a linker molecule, such as a polynucleotide linker or a non-nucleotide linker. In a further embodiment, the pyrimidine nucleotides present in the sense strand are 2′-deoxy-2′-fluoro pyrimidine nucleotides and the purine nucleotides present in the sense region are 2′-deoxy purine nucleotides. In another embodiment, the pyrimidine nucleotides present in the sense strand are 2′-deoxy-2′fluoro pyrimidine nucleotides and the purine nucleotides present in the sense region are 2′-O-methyl purine nucleotides. In still another embodiment, the pyrimidine nucleotides present in the antisense strand are 2′-deoxy-2′-fluoro pyrimidine nucleotides and any purine nucleotides present in the antisense strand are 2′-deoxy purine nucleotides. In another embodiment, the antisense strand comprises one or more 2′-deoxy-2′-fluoro pyrimidine nucleotides and one or more 2′-O-methyl purine nucleotides. In another embodiment, the pyrimidine nucleotides present in the antisense strand are 2′-deoxy-2′-fluoro pyrimidine nucleotides and any purine nucleotides present in the antisense strand are 2′-O-methyl purine nucleotides. In a further embodiment the sense strand comprises a 3′-end and a 5′-end, wherein a terminal cap moiety (e.g., an inverted deoxy abasic moiety or inverted deoxy nucleotide moiety such as inverted thymidine) is present at the 5′-end, the 3′-end, or both of the 5′ and 3′ ends of the sense strand. In another embodiment, the antisense strand comprises a phosphorothioate internucleotide linkage at the 3′ end of the antisense strand. In another embodiment, the antisense strand comprises a glyceryl modification at the 3′ end. In another embodiment, the 5′-end of the antisense strand optionally includes a phosphate group.

[0067] In any of the above-described embodiments of a double-stranded short interfering nucleic acid (siNA) molecule that inhibits expression of a MAP kinase gene, wherein a majority of the pyrimidine nucleotides present in the double-stranded siNA molecule comprises a sugar modification, each of the two strands of the siNA molecule can comprise about 15 to about 30 or more (e.g., about 15, 16, 17, 18, 19, 20, 21, 22, 23, 24, 25, 26, 27, 28, 29, or 30 or more) nucleotides. In one embodiment, about 15 to about 30 or more (e.g., about 15, 16, 17, 18, 19, 20, 21, 22, 23, 24, 25, 26, 27, 28, 29, or 30 or more) nucleotides of each strand of the siNA molecule are base-paired to the complementary nucleotides of the other strand of the siNA molecule. In another embodiment, about 15 to about 30 or more (e.g., about 15, 16, 17, 18, 19, 20, 21, 22, 23, 24, 25, 26, 27, 28, 29, or 30 or more) nucleotides of each strand of the siNA molecule are base-paired to the complementary nucleotides of the other strand of the siNA molecule, wherein at least two 3′ terminal nucleotides of each strand of the siNA molecule are not base-paired to the nucleotides of the other strand of the siNA molecule. In another embodiment, each of the two 3′ terminal nucleotides of each fragment of the siNA molecule is a 2′-deoxy-pyrimidine, such as 2′-deoxy-thymidine. In one embodiment, each strand of the siNA molecule is base-paired to the complementary nucleotides of the other strand of the siNA molecule. In one embodiment, about 15 to about 30 (e.g., about 15, 16, 17, 18, 19, 20, 21, 22, 23, 24, 25, 26, 27, 28, 29, or 30) nucleotides of the antisense strand are base-paired to the nucleotide sequence of the MAP kinase RNA or a portion thereof. In one embodiment, about 18 to about 25 (e.g., about 18, 19, 20, 21, 22, 23, 24, or 25) nucleotides of the antisense strand are base-paired to the nucleotide sequence of the MAP kinase RNA or a portion thereof.

[0068] In one embodiment, the invention features a double-stranded short interfering nucleic acid (siNA) molecule that inhibits expression of a MAP kinase gene, wherein one of the strands of the double-stranded siNA molecule is an antisense strand which comprises nucleotide sequence that is complementary to nucleotide sequence of MAP kinase RNA or a portion thereof, the other strand is a sense strand which comprises nucleotide sequence that is complementary to a nucleotide sequence of the antisense strand and wherein a majority of the pyrimidine nucleotides present in the double-stranded siNA molecule comprises a sugar modification, and wherein the 5′-end of the antisense strand optionally includes a phosphate group.

[0069] In one embodiment, the invention features a double-stranded short interfering nucleic acid (siNA) molecule that inhibits expression of a MAP kinase gene, wherein one of the strands of the double-stranded siNA molecule is an antisense strand which comprises nucleotide sequence that is complementary to nucleotide sequence of MAP kinase RNA or a portion thereof, the other strand is a sense strand which comprises nucleotide sequence that is complementary to a nucleotide sequence of the antisense strand and wherein a majority of the pyrimidine nucleotides present in the double-stranded siNA molecule comprises a sugar modification, and wherein the nucleotide sequence or a portion thereof of the antisense strand is complementary to a nucleotide sequence of the untranslated region or a portion thereof of the MAP kinase RNA.

[0070] In one embodiment, the invention features a double-stranded short interfering nucleic acid (siNA) molecule that inhibits expression of a MAP kinase gene, wherein one of the strands of the double-stranded siNA molecule is an antisense strand which comprises nucleotide sequence that is complementary to nucleotide sequence of MAP kinase RNA or a portion thereof, wherein the other strand is a sense strand which comprises nucleotide sequence that is complementary to a nucleotide sequence of the antisense strand, wherein a majority of the pyrimidine nucleotides present in the double-stranded siNA molecule comprises a sugar modification, and wherein the nucleotide sequence of the antisense strand is complementary to a nucleotide sequence of the MAP kinase RNA or a portion thereof that is present in the MAP kinase RNA.

[0071] In one embodiment, the invention features a composition comprising a siNA molecule of the invention in a pharmaceutically acceptable carrier or diluent.

[0072] In a non-limiting example, the introduction of chemically-modified nucleotides into nucleic acid molecules provides a powerful tool in overcoming potential limitations of in vivo stability and bioavailability inherent to native RNA molecules that are delivered exogenously. For example, the use of chemically-modified nucleic acid molecules can enable a lower dose of a particular nucleic acid molecule for a given therapeutic effect since chemically-modified nucleic acid molecules tend to have a longer half-life in serum. Furthermore, certain chemical modifications can improve the bioavailability of nucleic acid molecules by targeting particular cells or tissues and/or improving cellular uptake of the nucleic acid molecule. Therefore, even if the activity of a chemically-modified nucleic acid molecule is reduced as compared to a native nucleic acid molecule, for example, when compared to an all-RNA nucleic acid molecule, the overall activity of the modified nucleic acid molecule can be greater than that of the native molecule due to improved stability and/or delivery of the molecule. Unlike native unmodified siNA, chemically-modified siNA can also minimize the possibility of activating interferon activity in humans.

[0073] In any of the embodiments of siNA molecules described herein, the antisense region of a siNA molecule of the invention can comprise a phosphorothioate internucleotide linkage at the 3′-end of said antisense region. In any of the embodiments of siNA molecules described herein, the antisense region can comprise about one to about five phosphorothioate internucleotide linkages at the 5′-end of said antisense region. In any of the embodiments of siNA molecules described herein, the 3′-terminal nucleotide overhangs of a siNA molecule of the invention can comprise ribonucleotides or deoxyribonucleotides that are chemically-modified at a nucleic acid sugar, base, or backbone. In any of the embodiments of siNA molecules described herein, the 3′-terminal nucleotide overhangs can comprise one or more universal base ribonucleotides. In any of the embodiments of siNA molecules described herein, the 3′-terminal nucleotide overhangs can comprise one or more acyclic nucleotides.

[0074] One embodiment of the invention provides an expression vector comprising a nucleic acid sequence encoding at least one siNA molecule of the invention in a manner that allows expression of the nucleic acid molecule. Another embodiment of the invention provides a mammalian cell comprising such an expression vector. The mammalian cell can be a human cell. The siNA molecule of the expression vector can comprise a sense region and an antisense region. The antisense region can comprise sequence complementary to a RNA or DNA sequence encoding MAP kinase and the sense region can comprise sequence complementary to the antisense region. The siNA molecule can comprise two distinct strands having complementary sense and antisense regions. The siNA molecule can comprise a single strand having complementary sense and antisense regions.

[0075] In one embodiment, the invention features a chemically-modified short interfering nucleic acid (siNA) molecule capable of mediating RNA interference (RNAi) against MAP kinase inside a cell or reconstituted in vitro system, wherein the chemical modification comprises one or more (e.g., about 1, 2, 3, 4, 5, 6, 7, 8, 9, 10, or more) nucleotides comprising a backbone modified internucleotide linkage having Formula I:

[chemical structure]

wherein each R1 and R2 is independently any nucleotide, non-nucleotide, or polynucleotide which can be naturally-occurring or chemically-modified, each X and Y is independently O, S, N, alkyl, or substituted alkyl, each Z and W is independently O, S, N, alkyl, substituted alkyl, O-alkyl, S-alkyl, alkaryl, aralkyl, or acetyl and wherein W, X, Y, and Z are optionally not all O. In another embodiment, a backbone modification of the invention comprises a phosphonoacetate and/or thiophosphonoacetate internucleotide linkage (see for example Sheehan et al., 2003, Nucleic Acids Research, 31, 4109-4118).

[0076] The chemically-modified internucleotide linkages having Formula I, for example, wherein any Z, W, X, and/or Y independently comprises a sulphur atom, can be present in one or both oligonucleotide strands of the siNA duplex, for example, in the sense strand, the antisense strand, or both strands. The siNA molecules of the invention can comprise one or more (e.g., about 1, 2, 3, 4, 5, 6, 7, 8, 9, 10, or more) chemically-modified internucleotide linkages having Formula I at the 3′-end, the 5′-end, or both of the 3′ and 5′-ends of the sense strand, the antisense strand, or both strands. For example, an exemplary siNA molecule of the invention can comprise about 1 to about 5 or more (e.g., about 1, 2, 3, 4, 5, or more) chemically-modified internucleotide linkages having Formula I at the 5′-end of the sense strand, the antisense strand, or both strands. In another non-limiting example, an exemplary siNA molecule of the invention can comprise one or more (e.g., about 1, 2, 3, 4, 5, 6, 7, 8, 9, 10, or more) pyrimidine nucleotides with chemically-modified internucleotide linkages having Formula I in the sense strand, the antisense strand, or both strands. In yet another non-limiting example, an exemplary siNA molecule of the invention can comprise one or more (e.g., about 1, 2, 3, 4, 5, 6, 7, 8, 9, 10, or more) purine nucleotides with chemically-modified internucleotide linkages having Formula I in the sense strand, the antisense strand, or both strands. In another embodiment, a siNA molecule of the invention having internucleotide linkage(s) of Formula I also comprises a chemically-modified nucleotide or non-nucleotide having any of Formulae I-VII.

[0077] In one embodiment, the invention features a chemically-modified short interfering nucleic acid (siNA) molecule capable of mediating RNA interference (RNAi) against MAP kinase inside a cell or reconstituted in vitro system, wherein the chemical modification comprises one or more (e.g., about 1, 2, 3, 4, 5, 6, 7, 8, 9, 10, or more) nucleotides or non-nucleotides having Formula II:

[chemical structure]

wherein each R3, R4, R5, R6, R7, R8, R10, R11 and R12 is independently H, OH, alkyl, substituted alkyl, alkaryl or aralkyl, F, Cl, Br, CN, CF3, OCF3, OCN, O-alkyl, S-alkyl, N-alkyl, O-alkenyl, S-alkenyl, N-alkenyl, SO-alkyl, alkyl-SH, alkyl-OH, O-alkyl-OH, O-alkyl-SH, S-alkyl-OH, S-alkyl-SH, alkyl-S-alkyl, alkyl-O-alkyl, ONO2, NO2, N3, NH2, aminoalkyl, aminoacid, aminoacyl, ONH2, O-aminoalkyl, O-aminoacid, O-aminoacyl, heterocycloalkyl, heterocycloalkaryl, aminoalkylamino, polyalklylamino, substituted silyl, or group having Formula I or II; R9 is O, S, CH2, S═O, CHF, or CF2, and B is a nucleosidic base such as adenine, guanine, uracil, cytosine, thymine, 2-aminoadenosine, 5-methylcytosine, 2,6-diaminopurine, or any other non-naturally occurring base that can be complementary or non-complementary to target RNA or a non-nucleosidic base such as phenyl, naphthyl, 3-nitropyrrole, 5-nitroindole, nebularine, pyridone, pyridinone, or any other non-naturally occurring universal base that can be complementary or non-complementary to target RNA.

[0078] The chemically-modified nucleotide or non-nucleotide of Formula II can be present in one or both oligonucleotide strands of the siNA duplex, for example in the sense strand, the antisense strand, or both strands. The siNA molecules of the invention can comprise one or more chemically-modified nucleotides or non-nucleotides of Formula II at the 3′-end, the 5′-end, or both of the 3′ and 5′-ends of the sense strand, the antisense strand, or both strands. For example, an exemplary siNA molecule of the invention can comprise about 1 to about 5 or more (e.g., about 1, 2, 3, 4, 5, or more) chemically-modified nucleotides or non-nucleotides of Formula II at the 5′-end of the sense strand, the antisense strand, or both strands. In anther non-limiting example, an exemplary siNA molecule of the invention can comprise about 1 to about 5 or more (e.g., about 1, 2, 3, 4, 5, or more) chemically-modified nucleotides or non-nucleotides of Formula II at the 3′-end of the sense strand, the antisense strand, or both strands.

[0079] In one embodiment, the invention features a chemically-modified short interfering nucleic acid (siNA) molecule capable of mediating RNA interference (RNAi) against MAP kinase inside a cell or reconstituted in vitro system, wherein the chemical modification comprises one or more (e.g., about 1, 2, 3, 4, 5, 6, 7, 8, 9, 10, or more) nucleotides or non-nucleotides having Formula III:

[chemical structure]

wherein each R3, R4, R5, R6, R7, R8, R10, R11 and R12 is independently H, OH, alkyl, substituted alkyl, alkaryl or aralkyl, F, Cl, Br, CN, CF3, OCF3, OCN, O-alkyl, S-alkyl, N-alkyl, O-alkenyl, S-alkenyl, N-alkenyl, SO-alkyl, alkyl-SH, alkyl-OH, O-alkyl-OH, O-alkyl-SH, S-alkyl-OH, S-alkyl-SH, alkyl-S-alkyl, alkyl-O-alkyl, ONO2, NO2, N3, NH2, aminoalkyl, aminoacid, aminoacyl, ONH2, O-aminoalkyl, O-aminoacid, O-aminoacyl, heterocycloalkyl, heterocycloalkaryl, aminoalkylamino, polyalklylamino, substituted silyl, or group having Formula I or II; R9 is O, S, CH2, S═O, CHF, or CF2, and B is a nucleosidic base such as adenine, guanine, uracil, cytosine, thymine, 2-aminoadenosine, 5-methylcytosine, 2,6-diaminopurine, or any other non-naturally occurring base that can be employed to be complementary or non-complementary to target RNA or a non-nucleosidic base such as phenyl, naphthyl, 3-nitropyrrole, 5-nitroindole, nebularine, pyridone, pyridinone, or any other non-naturally occurring universal base that can be complementary or non-complementary to target RNA.

[0080] The chemically-modified nucleotide or non-nucleotide of Formula III can be present in one or both oligonucleotide strands of the siNA duplex, for example, in the sense strand, the antisense strand, or both strands. The siNA molecules of the invention can comprise one or more chemically-modified nucleotides or non-nucleotides of Formula III at the 3′-end, the 5′-end, or both of the 3′ and 5′-ends of the sense strand, the antisense strand, or both strands. For example, an exemplary siNA molecule of the invention can comprise about 1 to about 5 or more (e.g., about 1, 2, 3, 4, 5, or more) chemically-modified nucleotide(s) or non-nucleotide(s) of Formula III at the 5′-end of the sense strand, the antisense strand, or both strands. In another non-limiting example, an exemplary siNA molecule of the invention can comprise about 1 to about 5 or more (e.g., about 1, 2, 3, 4, 5, or more) chemically-modified nucleotide or non-nucleotide of Formula III at the 3′-end of the sense strand, the antisense strand, or both strands.

[0081] In another embodiment, a siNA molecule of the invention comprises a nucleotide having Formula II or III, wherein the nucleotide having Formula II or III is in an inverted configuration. For example, the nucleotide having Formula II or III is connected to the siNA construct in a 3′-3′,3′-2′,2′-3′, or 5′-5′ configuration, such as at the 3′-end, the 5′-end, or both of the 3′ and 5′-ends of one or both siNA strands.

[0082] In one embodiment, the invention features a chemically-modified short interfering nucleic acid (siNA) molecule capable of mediating RNA interference (RNAi) against MAP kinase inside a cell or reconstituted in vitro system, wherein the chemical modification comprises a 5′-terminal phosphate group having Formula IV:

[chemical structure]

wherein each X and Y is independently O, S, N, alkyl, substituted alkyl, or alkylhalo; wherein each Z and W is independently O, S, N, alkyl, substituted alkyl, O-alkyl, S-alkyl, alkaryl, aralkyl, alkylhalo, or acetyl; and wherein W, X, Y and Z are not all O.

[0083] In one embodiment, the invention features a siNA molecule having a 5′-terminal phosphate group having Formula IV on the target-complementary strand, for example, a strand complementary to a target RNA, wherein the siNA molecule comprises an all RNA siNA molecule. In another embodiment, the invention features a siNA molecule having a 5′-terminal phosphate group having Formula IV on the target-complementary strand wherein the siNA molecule also comprises about 1 to about 3 (e.g., about 1, 2, or 3) nucleotide 3′-terminal nucleotide overhangs having about 1 to about 4 (e.g., about 1, 2, 3, or 4) deoxyribonucleotides on the 3′-end of one or both strands. In another embodiment, a 5′-terminal phosphate group having Formula IV is present on the target-complementary strand of a siNA molecule of the invention, for example a siNA molecule having chemical modifications having any of Formulae I-VII.

[0084] In one embodiment, the invention features a chemically-modified short interfering nucleic acid (siNA) molecule capable of mediating RNA interference (RNAi) against MAP kinase inside a cell or reconstituted in vitro system, wherein the chemical modification comprises one or more phosphorothioate internucleotide linkages. For example, in a non-limiting example, the invention features a chemically-modified short interfering nucleic acid (siNA) having about 1, 2, 3, 4, 5, 6, 7, 8 or more phosphorothioate internucleotide linkages in one siNA strand. In yet another embodiment, the invention features a chemically-modified short interfering nucleic acid (siNA) individually having about 1, 2, 3, 4, 5, 6, 7, 8 or more phosphorothioate internucleotide linkages in both siNA strands. The phosphorothioate internucleotide linkages can be present in one or both oligonucleotide strands of the siNA duplex, for example in the sense strand, the antisense strand, or both strands. The siNA molecules of the invention can comprise one or more phosphorothioate internucleotide linkages at the 3′-end, the 5′-end, or both of the 3′- and 5′-ends of the sense strand, the antisense strand, or both strands. For example, an exemplary siNA molecule of the invention can comprise about 1 to about 5 or more (e.g., about 1, 2, 3, 4, 5, or more) consecutive phosphorothioate internucleotide linkages at the 5′-end of the sense strand, the antisense strand, or both strands. In another non-limiting example, an exemplary siNA molecule of the invention can comprise one or more (e.g., about 1, 2, 3, 4, 5, 6, 7, 8, 9, 10, or more) pyrimidine phosphorothioate internucleotide linkages in the sense strand, the antisense strand, or both strands. In yet another non-limiting example, an exemplary siNA molecule of the invention can comprise one or more (e.g., about 1, 2, 3, 4, 5, 6, 7, 8, 9, 10, or more) purine phosphorothioate internucleotide linkages in the sense strand, the antisense strand, or both strands.

[0085] In one embodiment, the invention features a siNA molecule, wherein the sense strand comprises one or more, for example, about 1, 2, 3, 4, 5, 6, 7, 8, 9, 10, or more phosphorothioate internucleotide linkages, and/or one or more (e.g., about 1, 2, 3, 4, 5, 6, 7, 8, 9, 10 or more) 2′-deoxy, 2′-O-methyl, 2′-deoxy-2′-fluoro, and/or about one or more (e.g., about 1, 2, 3, 4, 5, 6, 7, 8, 9, 10 or more) universal base modified nucleotides, and optionally a terminal cap molecule at the 3′-end, the 5′-end, or both of the 3′- and 5′-ends of the sense strand; and wherein the antisense strand comprises about 1 to about 10 or more, specifically about 1, 2, 3, 4, 5, 6, 7, 8, 9, 10, or more phosphorothioate internucleotide linkages, and/or one or more (e.g., about 1, 2, 3, 4, 5, 6, 7, 8, 9, 10 or more) 2′-deoxy, 2′-O-methyl, 2′-deoxy-2′-fluoro, and/or one or more (e.g., about 1, 2, 3, 4, 5, 6, 7, 8, 9, 10 or more) universal base modified nucleotides, and optionally a terminal cap molecule at the 3′-end, the 5′-end, or both of the 3′- and 5′-ends of the antisense strand. In another embodiment, one or more, for example about 1, 2, 3, 4, 5, 6, 7, 8, 9, 10, or more, pyrimidine nucleotides of the sense and/or antisense siNA strand are chemically-modified with 2′-deoxy, 2′-O-methyl and/or 2′-deoxy-2′-fluoro nucleotides, with or without one or more, for example about 1, 2, 3, 4, 5, 6, 7, 8, 9, 10, or more, phosphorothioate internucleotide linkages and/or a terminal cap molecule at the 3′-end, the 5′-end, or both of the 3′- and 5′-ends, being present in the same or different strand.

[0086] In another embodiment, the invention features a siNA molecule, wherein the sense strand comprises about 1 to about 5, specifically about 1, 2, 3, 4, or 5 phosphorothioate internucleotide linkages, and/or one or more (e.g., about 1, 2, 3, 4, 5, or more) 2′-deoxy, 2′-O-methyl, 2′-deoxy-2′-fluoro, and/or one or more (e.g., about 1, 2, 3, 4, 5, or more) universal base modified nucleotides, and optionally a terminal cap molecule at the 3-end, the 5′-end, or both of the 3′- and 5′-ends of the sense strand; and wherein the antisense strand comprises about 1 to about 5 or more, specifically about 1, 2, 3, 4, 5, or more phosphorothioate internucleotide linkages, and/or one or more (e.g., about 1, 2, 3, 4, 5, 6, 7, 8, 9, 10 or more) 2′-deoxy, 2′-O-methyl, 2′-deoxy-2′-fluoro, and/or one or more (e.g., about 1, 2, 3, 4, 5, 6, 7, 8, 9, 10 or more) universal base modified nucleotides, and optionally a terminal cap molecule at the 3′-end, the 5′-end, or both of the 3′- and 5′-ends of the antisense strand. In another embodiment, one or more, for example about 1, 2, 3, 4, 5, 6, 7, 8, 9, 10, or more, pyrimidine nucleotides of the sense and/or antisense siNA strand are chemically-modified with 2′-deoxy, 2′-O-methyl and/or 2′-deoxy-2′-fluoro nucleotides, with or without about 1 to about 5 or more, for example about 1, 2, 3, 4, 5, or more phosphorothioate internucleotide linkages and/or a terminal cap molecule at the 3′-end, the 5′-end, or both of the 3′- and 5′-ends, being present in the same or different strand.

[0087] In one embodiment, the invention features a siNA molecule, wherein the sense strand comprises one or more, for example, about 1, 2, 3, 4, 5, 6, 7, 8, 9, 10, or more phosphorothioate internucleotide linkages, and/or about one or more (e.g., about 1, 2, 3, 4, 5, 6, 7, 8, 9, 10 or more) 2′-deoxy, 2′-O-methyl, 2′-deoxy-2′-fluoro, and/or one or more (e.g., about 1, 2, 3, 4, 5, 6, 7, 8, 9, 10 or more) universal base modified nucleotides, and optionally a terminal cap molecule at the 3′-end, the 5′-end, or both of the 3′- and 5′-ends of the sense strand; and wherein the antisense strand comprises about 1 to about 10 or more, specifically about 1, 2, 3, 4, 5, 6, 7, 8, 9, 10 or more phosphorothioate internucleotide linkages, and/or one or more (e.g., about 1, 2, 3, 4, 5, 6, 7, 8, 9, 10 or more) 2′-deoxy, 2′-O-methyl, 2′-deoxy-2′-fluoro, and/or one or more (e.g., about 1, 2, 3, 4, 5, 6, 7, 8, 9, 10 or more) universal base modified nucleotides, and optionally a terminal cap molecule at the 3′-end, the 5′-end, or both of the 3′- and 5′-ends of the antisense strand. In another embodiment, one or more, for example about 1, 2, 3, 4, 5, 6, 7, 8, 9, 10 or more pyrimidine nucleotides of the sense and/or antisense siNA strand are chemically-modified with 2′-deoxy, 2′-O-methyl and/or 2′-deoxy-2′-fluoro nucleotides, with or without one or more, for example, about 1, 2, 3, 4, 5, 6, 7, 8, 9, 10 or more phosphorothioate internucleotide linkages and/or a terminal cap molecule at the 3′-end, the 5′-end, or both of the 3′ and 5′-ends, being present in the same or different strand.

[0088] In another embodiment, the invention features a siNA molecule, wherein the sense strand comprises about 1 to about 5 or more, specifically about 1, 2, 3, 4, 5 or more phosphorothioate internucleotide linkages, and/or one or more (e.g., about 1, 2, 3, 4, 5, 6, 7, 8, 9, 10 or more) 2′-deoxy, 2′-O-methyl, 2′-deoxy-2′-fluoro, and/or one or more (e.g., about 1, 2, 3, 4, 5, 6, 7, 8, 9, 10 or more) universal base modified nucleotides, and optionally a terminal cap molecule at the 3′-end, the 5′-end, or both of the 3′- and 5′-ends of the sense strand; and wherein the antisense strand comprises about 1 to about 5 or more, specifically about 1, 2, 3, 4, 5 or more phosphorothioate internucleotide linkages, and/or one or more (e.g., about 1, 2, 3, 4, 5, 6, 7, 8, 9, 10 or more) 2′-deoxy, 2′-O-methyl, 2′-deoxy-2′-fluoro, and/or one or more (e.g., about 1, 2, 3, 4, 5, 6, 7, 8, 9, 10 or more) universal base modified nucleotides, and optionally a terminal cap molecule at the 3′-end, the 5′-end, or both of the 3′- and 5′-ends of the antisense strand. In another embodiment, one or more, for example about 1, 2, 3, 4, 5, 6, 7, 8, 9, 10 or more pyrimidine nucleotides of the sense and/or antisense siNA strand are chemically-modified with 2′-deoxy, 2′-O-methyl and/or 2′-deoxy-2′-fluoro nucleotides, with or without about 1 to about 5, for example about 1, 2, 3, 4, 5 or more phosphorothioate internucleotide linkages and/or a terminal cap molecule at the 3′-end, the 5′-end, or both of the 3′- and 5′-ends, being present in the same or different strand.

[0089] In one embodiment, the invention features a chemically-modified short interfering nucleic acid (siNA) molecule having about 1 to about 5 or more (specifically about 1, 2, 3, 4, 5 or more) phosphorothioate internucleotide linkages in each strand of the siNA molecule.

[0090] In another embodiment, the invention features a siNA molecule comprising 2′-5′ internucleotide linkages. The 2′-5′ internucleotide linkage(s) can be at the 3′-end, the 5′-end, or both of the 3′- and 5′-ends of one or both siNA sequence strands. In addition, the 2′-5′ internucleotide linkage(s) can be present at various other positions within one or both siNA sequence strands, for example, about 1, 2, 3, 4, 5, 6, 7, 8, 9, 10, or more including every internucleotide linkage of a pyrimidine nucleotide in one or both strands of the siNA molecule can comprise a 2′-5′ internucleotide linkage, or about 1, 2, 3, 4, 5, 6, 7, 8, 9, 10, or more including every internucleotide linkage of a purine nucleotide in one or both strands of the siNA molecule can comprise a 2′-5′ internucleotide linkage.

[0091] In another embodiment, a chemically-modified siNA molecule of the invention comprises a duplex having two strands, one or both of which can be chemically-modified, wherein each strand is independently about 15 to about 30 (e.g., about 15, 16, 17, 18, 19, 20, 21, 22, 23, 24, 25, 26, 27, 28, 29, or 30) nucleotides in length, wherein the duplex has about 15 to about 30 (e.g., about 15, 16, 17, 18, 19, 20, 21, 22, 23, 24, 25, 26, 27, 28, 29, or 30) base pairs, and wherein the chemical modification comprises a structure having any of Formulae I-VII. For example, an exemplary chemically-modified siNA molecule of the invention comprises a duplex having two strands, one or both of which can be chemically-modified with a chemical modification having any of Formulae I-VII or any combination thereof, wherein each strand consists of about 21 nucleotides, each having a 2-nucleotide 3′-terminal nucleotide overhang, and wherein the duplex has about 19 base pairs. In another embodiment, a siNA molecule of the invention comprises a single stranded hairpin structure, wherein the siNA is about 36 to about 70 (e.g., about 36, 40, 45, 50, 55, 60, 65, or 70) nucleotides in length having about 15 to about 30 (e.g., about 15, 16, 17, 18, 19, 20, 21, 22, 23, 24, 25, 26, 27, 28, 29, or 30) base pairs, and wherein the siNA can include a chemical modification comprising a structure having any of Formulae I-VII or any combination thereof. For example, an exemplary chemically-modified siNA molecule of the invention comprises a linear oligonucleotide having about 42 to about 50 (e.g., about 42, 43, 44, 45, 46, 47, 48, 49, or 50) nucleotides that is chemically-modified with a chemical modification having any of Formulae I-VII or any combination thereof, wherein the linear oligonucleotide forms a hairpin structure having about 19 to about 21 (e.g., 19, 20, or 21) base pairs and a 2-nucleotide 3′-terminal nucleotide overhang. In another embodiment, a linear hairpin siNA molecule of the invention contains a stem loop motif, wherein the loop portion of the siNA molecule is biodegradable. For example, a linear hairpin siNA molecule of the invention is designed such that degradation of the loop portion of the siNA molecule in vivo can generate a double-stranded siNA molecule with 3′-terminal overhangs, such as 3′-terminal nucleotide overhangs comprising about 2 nucleotides.

[0092] In another embodiment, a siNA molecule of the invention comprises a hairpin structure, wherein the siNA is about 25 to about 50 (e.g., about 25, 26, 27, 28, 29, 30, 31, 32, 33, 34, 35, 36, 37, 38, 39, 40, 41, 42, 43, 44, 45, 46, 47, 48, 49, or 50) nucleotides in length having about 3 to about 25 (e.g., about 3, 4, 5, 6, 7, 8, 9, 10, 11, 12, 13, 14, 15, 16, 17, 18, 19, 20, 21, 22, 23, 24, or 25) base pairs, and wherein the siNA can include one or more chemical modifications comprising a structure having any of Formulae I-VII or any combination thereof. For example, an exemplary chemically-modified siNA molecule of the invention comprises a linear oligonucleotide having about 25 to about 35 (e.g., about 25, 26, 27, 28, 29, 30, 31, 32, 33, 34, or 35) nucleotides that is chemically-modified with one or more chemical modifications having any of Formulae I-VII or any combination thereof, wherein the linear oligonucleotide forms a hairpin structure having about 3 to about 25 (e.g., about 3, 4, 5, 6, 7, 8, 9, 10, 11, 12, 13, 14, 15, 16, 17, 18, 19, 20, 21, 22, 23, 24, or 25) base pairs and a 5′-terminal phosphate group that can be chemically modified as described herein (for example a 5′-terminal phosphate group having Formula IV). In another embodiment, a linear hairpin siNA molecule of the invention contains a stem loop motif, wherein the loop portion of the siNA molecule is biodegradable. In one embodiment, a linear hairpin siNA molecule of the invention comprises a loop portion comprising a non-nucleotide linker.

[0093] In another embodiment, a siNA molecule of the invention comprises an asymmetric hairpin structure, wherein the siNA is about 25 to about 50 (e.g., about 25, 26, 27, 28, 29, 30, 31, 32, 33, 34, 35, 36, 37, 38, 39, 40, 41, 42, 43, 44, 45, 46, 47, 48, 49, or 50) nucleotides in length having about 3 to about 25 (e.g., about 3, 4, 5, 6, 7, 8, 9, 10, 11, 12, 13, 14, 15, 16, 17, 18, 19, 20, 21, 22, 23, 24, or 25) base pairs, and wherein the siNA can include one or more chemical modifications comprising a structure having any of Formulae I-VII or any combination thereof. For example, an exemplary chemically-modified siNA molecule of the invention comprises a linear oligonucleotide having about 25 to about 35 (e.g., about 25, 26, 27, 28, 29, 30, 31, 32, 33, 34, or 35) nucleotides that is chemically-modified with one or more chemical modifications having any of Formulae I-VII or any combination thereof, wherein the linear oligonucleotide forms an asymmetric hairpin structure having about 3 to about 25 (e.g., about 3, 4, 5, 6, 7, 8, 9, 10, 11, 12, 13, 14, 15, 16, 17, 18, 19, 20, 21, 22, 23, 24, or 25) base pairs and a 5′-terminal phosphate group that can be chemically modified as described herein (for example a 5′-terminal phosphate group having Formula IV). In one embodiment, an asymmetric hairpin siNA molecule of the invention contains a stem loop motif, wherein the loop portion of the siNA molecule is biodegradable. In another embodiment, an asymmetric hairpin siNA molecule of the invention comprises a loop portion comprising a non-nucleotide linker.

[0094] In another embodiment, a siNA molecule of the invention comprises an asymmetric double stranded structure having separate polynucleotide strands comprising sense and antisense regions, wherein the antisense region is about 15 to about 30 (e.g., about 15, 16, 17, 18, 19, 20, 21, 22, 23, 24, 25, 26, 27, 28, 29, or 30) nucleotides in length, wherein the sense region is about 3 to about 25 (e.g., about 3, 4, 5, 6, 7, 8, 9, 10, 11, 12, 13, 14, 15, 16, 17, 18, 19, 20, 21, 22, 23, 24, or 25) nucleotides in length, wherein the sense region and the antisense region have at least 3 complementary nucleotides, and wherein the siNA can include one or more chemical modifications comprising a structure having any of Formulae I-VII or any combination thereof. For example, an exemplary chemically-modified siNA molecule of the invention comprises an asymmetric double stranded structure having separate polynucleotide strands comprising sense and antisense regions, wherein the antisense region is about 18 to about 23 (e.g., about 18, 19, 20, 21, 22, or 23) nucleotides in length and wherein the sense region is about 3 to about 15 (e.g., about 3, 4, 5, 6, 7, 8, 9, 10, 11, 12, 13, 14, or 15) nucleotides in length, wherein the sense region the antisense region have at least 3 complementary nucleotides, and wherein the siNA can include one or more chemical modifications comprising a structure having any of Formulae I-VII or any combination thereof. In another embodiment, the asymmetric double stranded siNA molecule can also have a 5′-terminal phosphate group that can be chemically modified as described herein (for example a 5′-terminal phosphate group having Formula IV).

[0095] In another embodiment, a siNA molecule of the invention comprises a circular nucleic acid molecule, wherein the siNA is about 38 to about 70 (e.g., about 38, 40, 45, 50, 55, 60, 65, or 70) nucleotides in length having about 15 to about 30 (e.g., about 15, 16, 17, 18, 19, 20, 21, 22, 23, 24, 25, 26, 27, 28, 29, or 30) base pairs, and wherein the siNA can include a chemical modification, which comprises a structure having any of Formulae I-VII or any combination thereof. For example, an exemplary chemically-modified siNA molecule of the invention comprises a circular oligonucleotide having about 42 to about 50 (e.g., about 42, 43, 44, 45, 46, 47, 48, 49, or 50) nucleotides that is chemically-modified with a chemical modification having any of Formulae I-VII or any combination thereof, wherein the circular oligonucleotide forms a dumbbell shaped structure having about 19 base pairs and 2 loops.

[0096] In another embodiment, a circular siNA molecule of the invention contains two loop motifs, wherein one or both loop portions of the siNA molecule is biodegradable. For example, a circular siNA molecule of the invention is designed such that degradation of the loop portions of the siNA molecule in vivo can generate a double-stranded siNA molecule with 3′-terminal overhangs, such as 3′-terminal nucleotide overhangs comprising about 2 nucleotides.

[0097] In one embodiment, a siNA molecule of the invention comprises at least one (e.g., about 1, 2, 3, 4, 5, 6, 7, 8, 9, 10, or more) abasic moiety, for example a compound having Formula V:

[chemical structure]

wherein each R3, R4, R5, R6, R7, R8, R10, R11, R12, and R13 is independently H, OH, alkyl, substituted alkyl, alkaryl or aralkyl, F, Cl, Br, CN, CF3, OCF3, OCN, O-alkyl, S-alkyl, N-alkyl, O-alkenyl, S-alkenyl, N-alkenyl, SO-alkyl, alkyl-SH, alkyl-OH, O-alkyl-OH, O-alkyl-SH, S-alkyl-OH, S-alkyl-SH, alkyl-S-alkyl, alkyl-O-alkyl, ONO2, NO2, N3, NH2, aminoalkyl, aminoacid, aminoacyl, ONH2, O-aminoalkyl, O-aminoacid, O-aminoacyl, heterocycloalkyl, heterocycloalkaryl, aminoalkylamino, polyalklylamino, substituted silyl, or group having Formula I or II; R9 is O, S, CH2, S═O, CHF, or CF2.

[0098] In one embodiment, a siNA molecule of the invention comprises at least one (e.g., about 1, 2, 3, 4, 5, 6, 7, 8, 9, 10, or more) inverted abasic moiety, for example a compound having Formula VI:

[chemical structure]

wherein each R3, R4, R5, R6, R7, R8, R10, R11, R12, and R13 is independently H, OH, alkyl, substituted alkyl, alkaryl or aralkyl, F, Cl, Br, CN, CF3, OCF3, OCN, O-alkyl, S-alkyl, N-alkyl, O-alkenyl, S-alkenyl, N-alkenyl, SO-alkyl, alkyl-SH, alkyl-OH, O-alkyl-OH, O-alkyl-SH, S-alkyl-OH, S-alkyl-SH, alkyl-S-alkyl, alkyl-O-alkyl, ONO2, NO2, N3, NH2, aminoalkyl, aminoacid, aminoacyl, ONH2, O-aminoalkyl, O-aminoacid, O-aminoacyl, heterocycloalkyl, heterocycloalkaryl, aminoalkylamino, polyalklylamino, substituted silyl, or group having Formula I or II; R9 is O, S, CH2, S═O, CHF, or CF2, and either R2, R3, R8 or R13 serve as points of attachment to the siNA molecule of the invention.

[0099] In another embodiment, a siNA molecule of the invention comprises at least one (e.g., about 1, 2, 3, 4, 5, 6, 7, 8, 9, 10, or more) substituted polyalkyl moieties, for example a compound having Formula VII:

[chemical structure]

wherein each n is independently an integer from 1 to 12, each R1, R2 and R3 is independently H, OH, alkyl, substituted alkyl, alkaryl or aralkyl, F, Cl, Br, CN, CF3, OCF3, OCN, O-alkyl, S-alkyl, N-alkyl, O-alkenyl, S-alkenyl, N-alkenyl, SO-alkyl, alkyl-SH, alkyl-OH, O-alkyl-OH, O-alkyl-SH, S-alkyl-OH, S-alkyl-SH, alkyl-S-alkyl, alkyl-O-alkyl, ONO2, NO2, N3, NH2, aminoalkyl, aminoacid, aminoacyl, ONH2, O -aminoalkyl, O-aminoacid, O-aminoacyl, heterocycloalkyl, heterocycloalkaryl, aminoalkylamino, polyalklylamino, substituted silyl, or a group having Formula I, and R1, R2 or R3 serves as points of attachment to the siNA molecule of the invention.

[0100] In another embodiment, the invention features a compound having Formula VII, wherein R1 and R2 are hydroxyl (OH) groups, n=1, and R3 comprises 0 and is the point of attachment to the 3′-end, the 5′-end, or both of the 3′ and 5′-ends of one or both strands of a double-stranded siNA molecule of the invention or to a single-stranded siNA molecule of the invention. This modification is referred to herein as “glyceryl” (for example modification 6 in FIG. 10).

[0101] In another embodiment, a chemically modified nucleoside or non-nucleoside (e.g. a moiety having any of Formula V, VI or VII) of the invention is at the 3′-end, the 5′-end, or both of the 3′ and 5′-ends of a siNA molecule of the invention. For example, chemically modified nucleoside or non-nucleoside (e.g., a moiety having Formula V, VI or VII) can be present at the 3′-end, the 5′-end, or both of the 3′ and 5′-ends of the antisense strand, the sense strand, or both antisense and sense strands of the siNA molecule. In one embodiment, the chemically modified nucleoside or non-nucleoside (e.g., a moiety having Formula V, VI or VII) is present at the 5′-end and 3′-end of the sense strand and the 3′-end of the antisense strand of a double stranded siNA molecule of the invention. In one embodiment, the chemically modified nucleoside or non-nucleoside (e.g., a moiety having Formula V, VI or VII) is present at the terminal position of the 5′-end and 3′-end of the sense strand and the 3′-end of the antisense strand of a double stranded siNA molecule of the invention. In one embodiment, the chemically modified nucleoside or non-nucleoside (e.g., a moiety having Formula V, VI or VII) is present at the two terminal positions of the 5′-end and 3′-end of the sense strand and the 3′-end of the antisense strand of a double stranded siNA molecule of the invention. In one embodiment, the chemically modified nucleoside or non-nucleoside (e.g., a moiety having Formula V, VI or VII) is present at the penultimate position of the 5′-end and 3′-end of the sense strand and the 3′-end of the antisense strand of a double stranded siNA molecule of the invention. In addition, a moiety having Formula VII can be present at the 3′-end or the 5′-end of a hairpin siNA molecule as described herein.

[0102] In another embodiment, a siNA molecule of the invention comprises an abasic residue having Formula V or VI, wherein the abasic residue having Formula VI or VI is connected to the siNA construct in a 3′-3′,3′-2′,2′-3′, or 5′-5′ configuration, such as at the 3′-end, the 5′-end, or both of the 3′ and 5′-ends of one or both siNA strands.

[0103] In one embodiment, a siNA molecule of the invention comprises one or more (e.g., about 1, 2, 3, 4, 5, 6, 7, 8, 9, 10, or more) locked nucleic acid (LNA) nucleotides, for example, at the 5′-end, the 3′-end, both of the 5′ and 3′-ends, or any combination thereof, of the siNA molecule.

[0104] In another embodiment, a siNA molecule of the invention comprises one or more (e.g., about 1, 2, 3, 4, 5, 6, 7, 8, 9, 10, or more) acyclic nucleotides, for example, at the 5′-end, the 3′-end, both of the 5′ and 3′-ends, or any combination thereof, of the siNA molecule.

[0105] In one embodiment, the invention features a chemically-modified short interfering nucleic acid (siNA) molecule of the invention comprising a sense region, wherein any (e.g., one or more or all) pyrimidine nucleotides present in the sense region are 2′-deoxy-2′-fluoro pyrimidine nucleotides (e.g., wherein all pyrimidine nucleotides are 2′-deoxy-2′-fluoro pyrimidine nucleotides or alternately a plurality of pyrimidine nucleotides are 2′-deoxy-2′-fluoro pyrimidine nucleotides), and wherein any (e.g., one or more or all) purine nucleotides present in the sense region are 2′-deoxy purine nucleotides (e.g., wherein all purine nucleotides are 2′-deoxy purine nucleotides or alternately a plurality of purine nucleotides are 2′-deoxy purine nucleotides).

[0106] In one embodiment, the invention features a chemically-modified short interfering nucleic acid (siNA) molecule of the invention comprising a sense region, wherein any (e.g., one or more or all) pyrimidine nucleotides present in the sense region are 2′-deoxy-2′-fluoro pyrimidine nucleotides (e.g., wherein all pyrimidine nucleotides are 2′-deoxy-2′-fluoro pyrimidine nucleotides or alternately a plurality of pyrimidine nucleotides are 2′-deoxy-2′-fluoro pyrimidine nucleotides), and wherein any (e.g., one or more or all) purine nucleotides present in the sense region are 2′-deoxy purine nucleotides (e.g., wherein all purine nucleotides are 2′-deoxy purine nucleotides or alternately a plurality of purine nucleotides are 2′-deoxy purine nucleotides), wherein any nucleotides comprising a 3′-terminal nucleotide overhang that are present in said sense region are 2′-deoxy nucleotides.

[0107] In one embodiment, the invention features a chemically-modified short interfering nucleic acid (siNA) molecule of the invention comprising a sense region, wherein any (e.g., one or more or all) pyrimidine nucleotides present in the sense region are 2′-deoxy-2′-fluoro pyrimidine nucleotides (e.g., wherein all pyrimidine nucleotides are 2′-deoxy-2′-fluoro pyrimidine nucleotides or alternately a plurality of pyrimidine nucleotides are 2′-deoxy-2′-fluoro pyrimidine nucleotides), and wherein any (e.g., one or more or all) purine nucleotides present in the sense region are 2′-O-methyl purine nucleotides (e.g., wherein all purine nucleotides are 2′-O-methyl purine nucleotides or alternately a plurality of purine nucleotides are 2′-O-methyl purine nucleotides).

[0108] In one embodiment, the invention features a chemically-modified short interfering nucleic acid (siNA) molecule of the invention comprising a sense region, wherein any (e.g., one or more or all) pyrimidine nucleotides present in the sense region are 2′-deoxy-2′-fluoro pyrimidine nucleotides (e.g., wherein all pyrimidine nucleotides are 2′-deoxy-2′-fluoro pyrimidine nucleotides or alternately a plurality of pyrimidine nucleotides are 2′-deoxy-2′-fluoro pyrimidine nucleotides), wherein any (e.g., one or more or all) purine nucleotides present in the sense region are 2′-O-methyl purine nucleotides (e.g., wherein all purine nucleotides are 2′-O-methyl purine nucleotides or alternately a plurality of purine nucleotides are 2′-O-methyl purine nucleotides), and wherein any nucleotides comprising a 3′-terminal nucleotide overhang that are present in said sense region are 2′-deoxy nucleotides.

[0109] In one embodiment, the invention features a chemically-modified short interfering nucleic acid (siNA) molecule of the invention comprising an antisense region, wherein any (e.g., one or more or all) pyrimidine nucleotides present in the antisense region are 2′-deoxy-2′-fluoro pyrimidine nucleotides (e.g., wherein all pyrimidine nucleotides are 2′-deoxy-2′-fluoro pyrimidine nucleotides or alternately a plurality of pyrimidine nucleotides are 2′-deoxy-2′-fluoro pyrimidine nucleotides), and wherein any (e.g., one or more or all) purine nucleotides present in the antisense region are 2′-O-methyl purine nucleotides (e.g., wherein all purine nucleotides are 2′-O-methyl purine nucleotides or alternately a plurality of purine nucleotides are 2′-O-methyl purine nucleotides).

[0110] In one embodiment, the invention features a chemically-modified short interfering nucleic acid (siNA) molecule of the invention comprising an antisense region, wherein any (e.g., one or more or all) pyrimidine nucleotides present in the antisense region are 2′-deoxy-2′-fluoro pyrimidine nucleotides (e.g., wherein all pyrimidine nucleotides are 2′-deoxy-2′-fluoro pyrimidine nucleotides or alternately a plurality of pyrimidine nucleotides are 2′-deoxy-2′-fluoro pyrimidine nucleotides), wherein any (e.g., one or more or all) purine nucleotides present in the antisense region are 2′-O-methyl purine nucleotides (e.g., wherein all purine nucleotides are 2′-O-methyl purine nucleotides or alternately a plurality of purine nucleotides are 2′-O-methyl purine nucleotides), and wherein any nucleotides comprising a 3′-terminal nucleotide overhang that are present in said antisense region are 2′-deoxy nucleotides.

[0111] In one embodiment, the invention features a chemically-modified short interfering nucleic acid (siNA) molecule of the invention comprising an antisense region, wherein any (e.g., one or more or all) pyrimidine nucleotides present in the antisense region are 2′-deoxy-2′-fluoro pyrimidine nucleotides (e.g., wherein all pyrimidine nucleotides are 2′-deoxy-2′-fluoro pyrimidine nucleotides or alternately a plurality of pyrimidine nucleotides are 2′-deoxy-2′-fluoro pyrimidine nucleotides), and wherein any (e.g., one or more or all) purine nucleotides present in the antisense region are 2′-deoxy purine nucleotides (e.g., wherein all purine nucleotides are 2′-deoxy purine nucleotides or alternately a plurality of purine nucleotides are 2′-deoxy purine nucleotides).

[0112] In one embodiment, the invention features a chemically-modified short interfering nucleic acid (siNA) molecule of the invention comprising an antisense region, wherein any (e.g., one or more or all) pyrimidine nucleotides present in the antisense region are 2′-deoxy-2′-fluoro pyrimidine nucleotides (e.g., wherein all pyrimidine nucleotides are 2′-deoxy-2′-fluoro pyrimidine nucleotides or alternately a plurality of pyrimidine nucleotides are 2′-deoxy-2′-fluoro pyrimidine nucleotides), and wherein any (e.g., one or more or all) purine nucleotides present in the antisense region are 2′-O-methyl purine nucleotides (e.g., wherein all purine nucleotides are 2′-O-methyl purine nucleotides or alternately a plurality of purine nucleotides are 2′-O-methyl purine nucleotides).

[0113] In one embodiment, the invention features a chemically-modified short interfering nucleic acid (siNA) molecule of the invention capable of mediating RNA interference (RNAi) against MAP kinase inside a cell or reconstituted in vitro system comprising a sense region, wherein one or more pyrimidine nucleotides present in the sense region are 2′-deoxy-2′-fluoro pyrimidine nucleotides (e.g., wherein all pyrimidine nucleotides are 2′-deoxy-2′-fluoro pyrimidine nucleotides or alternately a plurality of pyrimidine nucleotides are 2′-deoxy-2′-fluoro pyrimidine nucleotides), and one or more purine nucleotides present in the sense region are 2′-deoxy purine nucleotides (e.g., wherein all purine nucleotides are 2′-deoxy purine nucleotides or alternately a plurality of purine nucleotides are 2′-deoxy purine nucleotides), and an antisense region, wherein one or more pyrimidine nucleotides present in the antisense region are 2′-deoxy-2′-fluoro pyrimidine nucleotides (e.g., wherein all pyrimidine nucleotides are 2′-deoxy-2′-fluoro pyrimidine nucleotides or alternately a plurality of pyrimidine nucleotides are 2′-deoxy-2′-fluoro pyrimidine nucleotides), and one or more purine nucleotides present in the antisense region are 2′-O-methyl purine nucleotides (e.g., wherein all purine nucleotides are 2′-O-methyl purine nucleotides or alternately a plurality of purine nucleotides are 2′-O-methyl purine nucleotides). The sense region and/or the antisense region can have a terminal cap modification, such as any modification described herein or shown in FIG. 10, that is optionally present at the 3′-end, the 5′-end, or both of the 3′ and 5′-ends of the sense and/or antisense sequence. The sense and/or antisense region can optionally further comprise a 3′-terminal nucleotide overhang having about 1 to about 4 (e.g., about 1, 2, 3, or 4) 2′-deoxynucleotides. The overhang nucleotides can further comprise one or more (e.g., about 1, 2, 3, 4 or more) phosphorothioate, phosphonoacetate, and/or thiophosphonoacetate internucleotide linkages. Non-limiting examples of these chemically-modified siNAs are shown in FIGS. 4 and 5 and Tables III and IV herein. In any of these described embodiments, the purine nucleotides present in the sense region are alternatively 2′-O-methyl purine nucleotides (e.g., wherein all purine nucleotides are 2′-O-methyl purine nucleotides or alternately a plurality of purine nucleotides are 2′-O-methyl purine nucleotides) and one or more purine nucleotides present in the antisense region are 2′-O-methyl purine nucleotides (e.g., wherein all purine nucleotides are 2′-O-methyl purine nucleotides or alternately a plurality of purine nucleotides are 2′-O-methyl purine nucleotides). Also, in any of these embodiments, one or more purine nucleotides present in the sense region are alternatively purine ribonucleotides (e.g., wherein all purine nucleotides are purine ribonucleotides or alternately a plurality of purine nucleotides are purine ribonucleotides) and any purine nucleotides present in the antisense region are 2′-O-methyl purine nucleotides (e.g., wherein all purine nucleotides are 2′-O-methyl purine nucleotides or alternately a plurality of purine nucleotides are 2′-O-methyl purine nucleotides). Additionally, in any of these embodiments, one or more purine nucleotides present in the sense region and/or present in the antisense region are alternatively selected from the group consisting of 2′-deoxy nucleotides, locked nucleic acid (LNA) nucleotides, 2′-methoxyethyl nucleotides, 4′-thionucleotides, and 2′-O-methyl nucleotides (e.g., wherein all purine nucleotides are selected from the group consisting of 2′-deoxy nucleotides, locked nucleic acid (LNA) nucleotides, 2′-methoxyethyl nucleotides, 4′-thionucleotides, and 2′-O-methyl nucleotides or alternately a plurality of purine nucleotides are selected from the group consisting of 2′-deoxy nucleotides, locked nucleic acid (LNA) nucleotides, 2′-methoxyethyl nucleotides, 4′-thionucleotides, and 2′-O-methyl nucleotides).

[0114] In another embodiment, any modified nucleotides present in the siNA molecules of the invention, preferably in the antisense strand of the siNA molecules of the invention, but also optionally in the sense and/or both antisense and sense strands, comprise modified nucleotides having properties or characteristics similar to naturally occurring ribonucleotides. For example, the invention features siNA molecules including modified nucleotides having a Northern conformation (e.g., Northern pseudorotation cycle, see for example Saenger, Principles of Nucleic Acid Structure, Springer-Verlag ed., 1984). As such, chemically modified nucleotides present in the siNA molecules of the invention, preferably in the antisense strand of the siNA molecules of the invention, but also optionally in the sense and/or both antisense and sense strands, are resistant to nuclease degradation while at the same time maintaining the capacity to mediate RNAi. Non-limiting examples of nucleotides having a northern configuration include locked nucleic acid (LNA) nucleotides (e.g., 2′-O, 4′-C-methylene-(D-ribofuranosyl) nucleotides); 2′-methoxyethoxy (MOE) nucleotides; 2′-methyl-thio-ethyl, 2′-deoxy-2′-fluoro nucleotides, 2′-deoxy-2′-chloro nucleotides, 2′-azido nucleotides, and 2′-O-methyl nucleotides.

[0115] In one embodiment, the sense strand of a double stranded siNA molecule of the invention comprises a terminal cap moiety, (see for example FIG. 10) such as an inverted deoxyabaisc moiety, at the 3′-end, 5′-end, or both 3′ and 5′-ends of the sense strand.

[0116] In one embodiment, the invention features a chemically-modified short interfering nucleic acid molecule (siNA) capable of mediating RNA interference (RNAi) against MAP kinase inside a cell or reconstituted in vitro system, wherein the chemical modification comprises a conjugate covalently attached to the chemically-modified siNA molecule. Non-limiting examples of conjugates contemplated by the invention include conjugates and ligands described in Vargeese et al., U.S. Ser. No. 10/427,160, filed Apr. 30, 2003, incorporated by reference herein in its entirety, including the drawings. In another embodiment, the conjugate is covalently attached to the chemically-modified siNA molecule via a biodegradable linker. In one embodiment, the conjugate molecule is attached at the 3′-end of either the sense strand, the antisense strand, or both strands of the chemically-modified siNA molecule. In another embodiment, the conjugate molecule is attached at the 5′-end of either the sense strand, the antisense strand, or both strands of the chemically-modified siNA molecule. In yet another embodiment, the conjugate molecule is attached both the 3′-end and 5′-end of either the sense strand, the antisense strand, or both strands of the chemically-modified siNA molecule, or any combination thereof. In one embodiment, a conjugate molecule of the invention comprises a molecule that facilitates delivery of a chemically-modified siNA molecule into a biological system, such as a cell. In another embodiment, the conjugate molecule attached to the chemically-modified siNA molecule is a polyethylene glycol, human serum albumin, or a ligand for a cellular receptor that can mediate cellular uptake. Examples of specific conjugate molecules contemplated by the instant invention that can be attached to chemically-modified siNA molecules are described in Vargeese et al., U.S. Ser. No. 10/201,394, filed Jul. 22, 2002 incorporated by reference herein. The type of conjugates used and the extent of conjugation of siNA molecules of the invention can be evaluated for improved pharmacokinetic profiles, bioavailability, and/or stability of siNA constructs while at the same time maintaining the ability of the siNA to mediate RNAi activity. As such, one skilled in the art can screen siNA constructs that are modified with various conjugates to determine whether the siNA conjugate complex possesses improved properties while maintaining the ability to mediate RNAi, for example in animal models as are generally known in the art.

[0117] In one embodiment, the invention features a short interfering nucleic acid (siNA) molecule of the invention, wherein the siNA further comprises a nucleotide, non-nucleotide, or mixed nucleotide/non-nucleotide linker that joins the sense region of the siNA to the antisense region of the siNA. In one embodiment, a nucleotide linker of the invention can be a linker of ≧2 nucleotides in length, for example about 3, 4, 5, 6, 7, 8, 9, or 10 nucleotides in length. In another embodiment, the nucleotide linker can be a nucleic acid aptamer. By “aptamer” or “nucleic acid aptamer” as used herein is meant a nucleic acid molecule that binds specifically to a target molecule wherein the nucleic acid molecule has sequence that comprises a sequence recognized by the target molecule in its natural setting. Alternately, an aptamer can be a nucleic acid molecule that binds to a target molecule where the target molecule does not naturally bind to a nucleic acid. The target molecule can be any molecule of interest. For example, the aptamer can be used to bind to a ligand-binding domain of a protein, thereby preventing interaction of the naturally occurring ligand with the protein. This is a non-limiting example and those in the art will recognize that other embodiments can be readily generated using techniques generally known in the art. (See, for example, Gold et al., 1995, Annu. Rev. Biochem., 64, 763; Brody and Gold, 2000, J. Biotechnol., 74, 5; Sun, 2000, Curr. Opin. Mol. Ther., 2, 100; Kusser, 2000, J. Biotechnol., 74, 27; Hermann and Patel, 2000, Science, 287, 820; and Jayasena, 1999, Clinical Chemistry, 45, 1628.)

[0118] In yet another embodiment, a non-nucleotide linker of the invention comprises abasic nucleotide, polyether, polyamine, polyamide, peptide, carbohydrate, lipid, polyhydrocarbon, or other polymeric compounds (e.g. polyethylene glycols such as those having between 2 and 100 ethylene glycol units). Specific examples include those described by Seela and Kaiser, Nucleic Acids Res. 1990, 18:6353 and Nucleic Acids Res. 1987, 15:3113; Cload and Schepartz, J. Am. Chem. Soc. 1991, 113:6324; Richardson and Schepartz, J. Am. Chem. Soc. 1991, 113:5109; Ma et al., Nucleic Acids Res. 1993, 21:2585 and Biochemistry 1993, 32:1751; Durand et al., Nucleic Acids Res. 1990, 18:6353; McCurdy et al., Nucleosides & Nucleotides 1991, 10:287; Jschke et al., Tetrahedron Lett. 1993, 34:301; Ono et al., Biochemistry 1991, 30:9914; Arnold et al., International Publication No. WO 89/02439; Usman et al., International Publication No. WO 95/06731; Dudycz et al., International Publication No. WO 95/11910 and Ferentz and Verdine, J. Am. Chem. Soc. 1991, 113:4000, all hereby incorporated by reference herein. A “non-nucleotide” further means any group or compound that can be incorporated into a nucleic acid chain in the place of one or more nucleotide units, including either sugar and/or phosphate substitutions, and allows the remaining bases to exhibit their enzymatic activity. The group or compound can be abasic in that it does not contain a commonly recognized nucleotide base, such as adenosine, guanine, cytosine, uracil or thymine, for example at the C1 position of the sugar.

[0119] In one embodiment, the invention features a short interfering nucleic acid (siNA) molecule capable of mediating RNA interference (RNAi) inside a cell or reconstituted in vitro system, wherein one or both strands of the siNA molecule that are assembled from two separate oligonucleotides do not comprise any ribonucleotides. For example, a siNA molecule can be assembled from a single oligonculeotide where the sense and antisense regions of the siNA comprise separate oligonucleotides that do not have any ribonucleotides (e.g., nucleotides having a 2′-OH group) present in the oligonucleotides. In another example, a siNA molecule can be assembled from a single oligonculeotide where the sense and antisense regions of the siNA are linked or circularized by a nucleotide or non-nucleotide linker as described herein, wherein the oligonucleotide does not have any ribonucleotides (e.g., nucleotides having a 2′-OH group) present in the oligonucleotide. Applicant has surprisingly found that the presense of ribonucleotides (e.g., nucleotides having a 2′-hydroxyl group) within the siNA molecule is not required or essential to support RNAi activity. As such, in one embodiment, all positions within the siNA can include chemically modified nucleotides and/or non-nucleotides such as nucleotides and or non-nucleotides having Formula I, II, III, IV, V, VI, or VII or any combination thereof to the extent that the ability of the siNA molecule to support RNAi activity in a cell is maintained.

[0120] In one embodiment, a siNA molecule of the invention is a single stranded siNA molecule that mediates RNAi activity in a cell or reconstituted in vitro system comprising a single stranded polynucleotide having complementarity to a target nucleic acid sequence. In another embodiment, the single stranded siNA molecule of the invention comprises a 5′-terminal phosphate group. In another embodiment, the single stranded siNA molecule of the invention comprises a 5′-terminal phosphate group and a 3′-terminal phosphate group (e.g., a 2′,3′-cyclic phosphate). In another embodiment, the single stranded siNA molecule of the invention comprises about 15 to about 30 (e.g., about 15, 16, 17, 18, 19, 20, 21, 22, 23, 24, 25, 26, 27, 28, 29, or 30) nucleotides. In yet another embodiment, the single stranded siNA molecule of the invention comprises one or more chemically modified nucleotides or non-nucleotides described herein. For example, all the positions within the siNA molecule can include chemically-modified nucleotides such as nucleotides having any of Formulae I-VII, or any combination thereof to the extent that the ability of the siNA molecule to support RNAi activity in a cell is maintained.

[0121] In one embodiment, a siNA molecule of the invention is a single stranded siNA molecule that mediates RNAi activity in a cell or reconstituted in vitro system comprising a single stranded polynucleotide having complementarity to a target nucleic acid sequence, wherein one or more pyrimidine nucleotides present in the siNA are 2′-deoxy-2′-fluoro pyrimidine nucleotides (e.g., wherein all pyrimidine nucleotides are 2′-deoxy-2′-fluoro pyrimidine nucleotides or alternately a plurality of pyrimidine nucleotides are 2′-deoxy-2′-fluoro pyrimidine nucleotides), and wherein any purine nucleotides present in the antisense region are 2′-O-methyl purine nucleotides (e.g., wherein all purine nucleotides are 2′-O-methyl purine nucleotides or alternately a plurality of purine nucleotides are 2′-O-methyl purine nucleotides), and a terminal cap modification, such as any modification described herein or shown in FIG. 10, that is optionally present at the 3′-end, the 5′-end, or both of the 3′ and 5′-ends of the antisense sequence. The siNA optionally further comprises about 1 to about 4 or more (e.g., about 1, 2, 3, 4 or more) terminal 2′-deoxynucleotides at the 3′-end of the siNA molecule, wherein the terminal nucleotides can further comprise one or more (e.g., 1, 2, 3, 4 or more) phosphorothioate, phosphonoacetate, and/or thiophosphonoacetate internucleotide linkages, and wherein the siNA optionally further comprises a terminal phosphate group, such as a 5′-terminal phosphate group. In any of these embodiments, any purine nucleotides present in the antisense region are alternatively 2′-deoxy purine nucleotides (e.g., wherein all purine nucleotides are 2′-deoxy purine nucleotides or alternately a plurality of purine nucleotides are 2′-deoxy purine nucleotides). Also, in any of these embodiments, any purine nucleotides present in the siNA (i.e., purine nucleotides present in the sense and/or antisense region) can alternatively be locked nucleic acid (LNA) nucleotides (e.g., wherein all purine nucleotides are LNA nucleotides or alternately a plurality of purine nucleotides are LNA nucleotides). Also, in any of these embodiments, any purine nucleotides present in the siNA are alternatively 2′-methoxyethyl purine nucleotides (e.g., wherein all purine nucleotides are 2′-methoxyethyl purine nucleotides or alternately a plurality of purine nucleotides are 2′-methoxyethyl purine nucleotides). In another embodiment, any modified nucleotides present in the single stranded siNA molecules of the invention comprise modified nucleotides having properties or characteristics similar to naturally occurring ribonucleotides. For example, the invention features siNA molecules including modified nucleotides having a Northern conformation (e.g., Northern pseudorotation cycle, see for example Saenger, Principles of Nucleic Acid Structure, Springer-Verlag ed., 1984). As such, chemically modified nucleotides present in the single stranded siNA molecules of the invention are preferably resistant to nuclease degradation while at the same time maintaining the capacity to mediate RNAi.

[0122] In one embodiment, a siNA molecule of the invention comprises chemically modified nucleotides or non-nucleotides (e.g., having any of Formulae I-VII, such as 2′-deoxy, 2′-deoxy-2′-fluoro, or 2′-O-methyl nucleotides) at alternating positions within one or more strands or regions of the siNA molecule. For example, such chemical modifications can be introduced at every other position of a RNA based siNA molecule, starting at either the first or second nucleotide from the 3′-end or 5′-end of the siNA. In a non-limiting example, a double stranded siNA molecule of the invention in which each strand of the siNA is 21 nucleotides in length is featured wherein positions 1, 3, 5, 7, 9, 11, 13, 15, 17, 19 and 21 of each strand are chemically modified (e.g., with compounds having any of Formulae I-VII, such as such as 2′-deoxy, 2′-deoxy-2′-fluoro, or 2′-O-methyl nucleotides). In another non-limiting example, a double stranded siNA molecule of the invention in which each strand of the siNA is 21 nucleotides in length is featured wherein positions 2, 4, 6, 8, 10, 12, 14, 16, 18, and 20 of each strand are chemically modified (e.g., with compounds having any of Formulae I-VII, such as such as 2′-deoxy, 2′-deoxy-2′-fluoro, or 2′-O-methyl nucleotides). Such siNA molecules can further comprise terminal cap moieties and/or backbone modifications as described herein.

[0123] In one embodiment, the invention features a method for modulating the expression of a MAP kinase gene within a cell comprising: (a) synthesizing a siNA molecule of the invention, which can be chemically-modified, wherein one of the siNA strands comprises a sequence complementary to RNA of the MAP kinase gene; and (b) introducing the siNA molecule into a cell under conditions suitable to modulate the expression of the MAP kinase gene in the cell.

[0124] In one embodiment, the invention features a method for modulating the expression of a MAP kinase gene within a cell comprising: (a) synthesizing a siNA molecule of the invention, which can be chemically-modified, wherein one of the siNA strands comprises a sequence complementary to RNA of the MAP kinase gene and wherein the sense strand sequence of the siNA comprises a sequence identical or substantially similar to the sequence of the target RNA; and (b) introducing the siNA molecule into a cell under conditions suitable to modulate the expression of the MAP kinase gene in the cell.

[0125] In another embodiment, the invention features a method for modulating the expression of more than one MAP kinase gene within a cell comprising: (a) synthesizing siNA molecules of the invention, which can be chemically-modified, wherein one of the siNA strands comprises a sequence complementary to RNA of the MAP kinase genes; and (b) introducing the siNA molecules into a cell under conditions suitable to modulate the expression of the MAP kinase genes in the cell.

[0126] In another embodiment, the invention features a method for modulating the expression of two or more MAP kinase genes within a cell comprising: (a) synthesizing one or more siNA molecules of the invention, which can be chemically-modified, wherein the siNA strands comprise sequences complementary to RNA of the MAP kinase genes and wherein the sense strand sequences of the siNAs comprise sequences identical or substantially similar to the sequences of the target RNAs; and (b) introducing the siNA molecules into a cell under conditions suitable to modulate the expression of the MAP kinase genes in the cell.

[0127] In another embodiment, the invention features a method for modulating the expression of more than one MAP kinase gene within a cell comprising: (a) synthesizing a siNA molecule of the invention, which can be chemically-modified, wherein one of the siNA strands comprises a sequence complementary to RNA of the MAP kinase gene and wherein the sense strand sequence of the siNA comprises a sequence identical or substantially similar to the sequences of the target RNAs; and (b) introducing the siNA molecule into a cell under conditions suitable to modulate the expression of the MAP kinase genes in the cell.

[0128] In one embodiment, siNA molecules of the invention are used as reagents in ex vivo applications. For example, siNA reagents are introduced into tissue or cells that are transplanted into a subject for therapeutic effect. The cells and/or tissue can be derived from an organism or subject that later receives the explant, or can be derived from another organism or subject prior to transplantation. The siNA molecules can be used to modulate the expression of one or more genes in the cells or tissue, such that the cells or tissue obtain a desired phenotype or are able to perform a function when transplanted in vivo. In one embodiment, certain target cells from a patient are extracted. These extracted cells are contacted with siNAs targeting a specific nucleotide sequence within the cells under conditions suitable for uptake of the siNAs by these cells (e.g. using delivery reagents such as cationic lipids, liposomes and the like or using techniques such as electroporation to facilitate the delivery of siNAs into cells). The cells are then reintroduced back into the same patient or other patients. In one embodiment, the invention features a method of modulating the expression of a MAP kinase gene in a tissue explant comprising: (a) synthesizing a siNA molecule of the invention, which can be chemically-modified, wherein one of the siNA strands comprises a sequence complementary to RNA of the MAP kinase gene; and (b) introducing the siNA molecule into a cell of the tissue explant derived from a particular organism under conditions suitable to modulate the expression of the MAP kinase gene in the tissue explant. In another embodiment, the method further comprises introducing the tissue explant back into the organism the tissue was derived from or into another organism under conditions suitable to modulate the expression of the MAP kinase gene in that organism.

[0129] In one embodiment, the invention features a method of modulating the expression of a MAP kinase gene in a tissue explant comprising: (a) synthesizing a siNA molecule of the invention, which can be chemically-modified, wherein one of the siNA strands comprises a sequence complementary to RNA of the MAP kinase gene and wherein the sense strand sequence of the siNA comprises a sequence identical or substantially similar to the sequence of the target RNA; and (b) introducing the siNA molecule into a cell of the tissue explant derived from a particular organism under conditions suitable to modulate the expression of the MAP kinase gene in the tissue explant. In another embodiment, the method further comprises introducing the tissue explant back into the organism the tissue was derived from or into another organism under conditions suitable to modulate the expression of the MAP kinase gene in that organism.

[0130] In another embodiment, the invention features a method of modulating the expression of more than one MAP kinase gene in a tissue explant comprising: (a) synthesizing siNA molecules of the invention, which can be chemically-modified, wherein one of the siNA strands comprises a sequence complementary to RNA of the MAP kinase genes; and (b) introducing the siNA molecules into a cell of the tissue explant derived from a particular organism under conditions suitable to modulate the expression of the MAP kinase genes in the tissue explant. In another embodiment, the method further comprises introducing the tissue explant back into the organism the tissue was derived from or into another organism under conditions suitable to modulate the expression of the MAP kinase genes in that organism.

[0131] In one embodiment, the invention features a method of modulating the expression of a MAP kinase gene in a subject or organism comprising: (a) synthesizing a siNA molecule of the invention, which can be chemically-modified, wherein one of the siNA strands comprises a sequence complementary to RNA of the MAP kinase gene; and (b) introducing the siNA molecule into the subject or organism under conditions suitable to modulate the expression of the MAP kinase gene in the subject or organism. The level of MAP kinase protein or RNA can be determined using various methods well-known in the art.

[0132] In another embodiment, the invention features a method of modulating the expression of more than one MAP kinase gene in a subject or organism comprising: (a) synthesizing siNA molecules of the invention, which can be chemically-modified, wherein one of the siNA strands comprises a sequence complementary to RNA of the MAP kinase genes; and (b) introducing the siNA molecules into the subject or organism under conditions suitable to modulate the expression of the MAP kinase genes in the subject or organism. The level of MAP kinase protein or RNA can be determined as is known in the art.

[0133] In one embodiment, the invention features a method for modulating the expression of a MAP kinase gene within a cell comprising: (a) synthesizing a siNA molecule of the invention, which can be chemically-modified, wherein the siNA comprises a single stranded sequence having complementarity to RNA of the MAP kinase gene; and (b) introducing the siNA molecule into a cell under conditions suitable to modulate the expression of the MAP kinase gene in the cell.

[0134] In another embodiment, the invention features a method for modulating the expression of more than one MAP kinase gene within a cell comprising: (a) synthesizing siNA molecules of the invention, which can be chemically-modified, wherein the siNA comprises a single stranded sequence having complementarity to RNA of the MAP kinase gene; and (b) contacting the cell in vitro or in vivo with the siNA molecule under conditions suitable to modulate the expression of the MAP kinase genes in the cell.

[0135] In one embodiment, the invention features a method of modulating the expression of a MAP kinase gene in a tissue explant comprising: (a) synthesizing a siNA molecule of the invention, which can be chemically-modified, wherein the siNA comprises a single stranded sequence having complementarity to RNA of the MAP kinase gene; and (b) contacting a cell of the tissue explant derived from a particular subject or organism with the siNA molecule under conditions suitable to modulate the expression of the MAP kinase gene in the tissue explant. In another embodiment, the method further comprises introducing the tissue explant back into the subject or organism the tissue was derived from or into another subject or organism under conditions suitable to modulate the expression of the MAP kinase gene in that subject or organism.

[0136] In another embodiment, the invention features a method of modulating the expression of more than one MAP kinase gene in a tissue explant comprising: (a) synthesizing siNA molecules of the invention, which can be chemically-modified, wherein the siNA comprises a single stranded sequence having complementarity to RNA of the MAP kinase gene; and (b) introducing the siNA molecules into a cell of the tissue explant derived from a particular subject or organism under conditions suitable to modulate the expression of the MAP kinase genes in the tissue explant. In another embodiment, the method further comprises introducing the tissue explant back into the subject or organism the tissue was derived from or into another subject or organism under conditions suitable to modulate the expression of the MAP kinase genes in that subject or organism.

[0137] In one embodiment, the invention features a method of modulating the expression of a MAP kinase gene in a subject or organism comprising: (a) synthesizing a siNA molecule of the invention, which can be chemically-modified, wherein the siNA comprises a single stranded sequence having complementarity to RNA of the MAP kinase gene; and (b) introducing the siNA molecule into the subject or organism under conditions suitable to modulate the expression of the MAP kinase gene in the subject or organism.

[0138] In another embodiment, the invention features a method of modulating the expression of more than one MAP kinase gene in a subject or organism comprising: (a) synthesizing siNA molecules of the invention, which can be chemically-modified, wherein the siNA comprises a single stranded sequence having complementarity to RNA of the MAP kinase gene; and (b) introducing the siNA molecules into the subject or organism under conditions suitable to modulate the expression of the MAP kinase genes in the subject or organism.

[0139] In one embodiment, the invention features a method of modulating the expression of a MAP kinase gene in a subject or organism comprising contacting the subject or organism with a siNA molecule of the invention under conditions suitable to modulate the expression of the MAP kinase gene in the subject or organism.

[0140] In one embodiment, the invention features a method for treating or preventing an inflammatory disease, disorder, or condition in a subject or organism comprising contacting the subject or organism with a siNA molecule of the invention under conditions suitable to modulate the expression of the MAP kinase gene in the subject or organism.

[0141] In one embodiment, the invention features a method for treating or preventing a neurologic disease, disorder, or condition in a subject or organism comprising contacting the subject or organism with a siNA molecule of the invention under conditions suitable to modulate the expression of the MAP kinase gene in the subject or organism.

[0142] In one embodiment, the invention features a method for treating or preventing an ocular disease, disorder, or condition in a subject or organism comprising contacting the subject or organism with a siNA molecule of the invention under conditions suitable to modulate the expression of the MAP kinase gene in the subject or organism.

[0143] In one embodiment, the invention features a method for treating or preventing a respiratory disease, disorder, or condition in a subject or organism comprising contacting the subject or organism with a siNA molecule of the invention under conditions suitable to modulate the expression of the MAP kinase gene in the subject or organism.

[0144] In one embodiment, the invention features a method for treating or preventing an autoimmune disease, disorder, and/or condition in a subject or organism comprising contacting the subject or organism with a siNA molecule of the invention under conditions suitable to modulate the expression of the MAP kinase gene in the subject or organism.

[0145] In one embodiment, the invention features a method for treating or preventing an allergic disease, disorder, and/or condition in a subject or organism comprising contacting the subject or organism with a siNA molecule of the invention under conditions suitable to modulate the expression of the MAP kinase gene in the subject or organism.

[0146] In one embodiment, the invention features a method for treating or preventing a proliferative disease, disorder, and/or condition in a subject or organism comprising contacting the subject or organism with a siNA molecule of the invention under conditions suitable to modulate the expression of the MAP kinase gene in the subject or organism.

[0147] In one embodiment, the invention features a method for treating or preventing cancer in a subject or organism comprising contacting the subject or organism with a siNA molecule of the invention under conditions suitable to modulate the expression of the MAP kinase gene in the subject or organism.

[0148] In another embodiment, the invention features a method of modulating the expression of more than one MAP kinase genes in a subject or organism comprising contacting the subject or organism with one or more siNA molecules of the invention under conditions suitable to modulate the expression of the MAP kinase genes in the subject or organism.

[0149] The siNA molecules of the invention can be designed to down regulate or inhibit target (e.g., MAP kinase) gene expression through RNAi targeting of a variety of RNA molecules. In one embodiment, the siNA molecules of the invention are used to target various RNAs corresponding to a target gene. Non-limiting examples of such RNAs include messenger RNA (mRNA), alternate RNA splice variants of target gene(s), post-transcriptionally modified RNA of target gene(s), pre-mRNA of target gene(s), and/or RNA templates. If alternate splicing produces a family of transcripts that are distinguished by usage of appropriate exons, the instant invention can be used to inhibit gene expression through the appropriate exons to specifically inhibit or to distinguish among the functions of gene family members. For example, a protein that contains an alternatively spliced transmembrane domain can be expressed in both membrane bound and secreted forms. Use of the invention to target the exon containing the transmembrane domain can be used to determine the functional consequences of pharmaceutical targeting of membrane bound as opposed to the secreted form of the protein. Non-limiting examples of applications of the invention relating to targeting these RNA molecules include therapeutic pharmaceutical applications, pharmaceutical discovery applications, molecular diagnostic and gene function applications, and gene mapping, for example using single nucleotide polymorphism mapping with siNA molecules of the invention. Such applications can be implemented using known gene sequences or from partial sequences available from an expressed sequence tag (EST).

[0150] In another embodiment, the siNA molecules of the invention are used to target conserved sequences corresponding to a gene family or gene families such as MAP kinase family genes. As such, siNA molecules targeting multiple MAP kinase targets can provide increased therapeutic effect. In addition, siNA can be used to characterize pathways of gene function in a variety of applications. For example, the present invention can be used to inhibit the activity of target gene(s) in a pathway to determine the function of uncharacterized gene(s) in gene function analysis, mRNA function analysis, or translational analysis. The invention can be used to determine potential target gene pathways involved in various diseases and conditions toward pharmaceutical development. The invention can be used to understand pathways of gene expression involved in, for example cancer, inflammatory, autoimmune, neuroligic, ocular, respiratory, allergic, and/or proliferative diseases, disorders and conditions.

[0151] In one embodiment, siNA molecule(s) and/or methods of the invention are used to down regulate the expression of gene(s) that encode RNA referred to by Genbank Accession, for example, MAP kinase genes encoding RNA sequence(s) referred to herein by Genbank Accession number, for example, Genbank Accession Nos. shown in Table I.

[0152] In one embodiment, the invention features a method comprising: (a) generating a library of siNA constructs having a predetermined complexity; and (b) assaying the siNA constructs of (a) above, under conditions suitable to determine RNAi target sites within the target RNA sequence. In one embodiment, the siNA molecules of (a) have strands of a fixed length, for example, about 23 nucleotides in length. In another embodiment, the siNA molecules of (a) are of differing length, for example having strands of about 15 to about 30 (e.g., about 15, 16, 17, 18, 19, 20, 21, 22, 23, 24, 25, 26, 27, 28, 29, or 30) nucleotides in length. In one embodiment, the assay can comprise a reconstituted in vitro siNA assay as described herein. In another embodiment, the assay can comprise a cell culture system in which target RNA is expressed. In another embodiment, fragments of target RNA are analyzed for detectable levels of cleavage, for example by gel electrophoresis, northern blot analysis, or RNAse protection assays, to determine the most suitable target site(s) within the target RNA sequence. The target RNA sequence can be obtained as is known in the art, for example, by cloning and/or transcription for in vitro systems, and by cellular expression in in vivo systems.

[0153] In one embodiment, the invention features a method comprising: (a) generating a randomized library of siNA constructs having a predetermined complexity, such as of 4N, where N represents the number of base paired nucleotides in each of the siNA construct strands (eg. for a siNA construct having 21 nucleotide sense and antisense strands with 19 base pairs, the complexity would be 419); and (b) assaying the siNA constructs of (a) above, under conditions suitable to determine RNAi target sites within the target MAP kinase RNA sequence. In another embodiment, the siNA molecules of (a) have strands of a fixed length, for example about 23 nucleotides in length. In yet another embodiment, the siNA molecules of (a) are of differing length, for example having strands of about 15 to about 30 (e.g., about 15, 16, 17, 18, 19, 20, 21, 22, 23, 24, 25, 26, 27, 28, 29, or 30) nucleotides in length. In one embodiment, the assay can comprise a reconstituted in vitro siNA assay as described in Example 6 herein. In another embodiment, the assay can comprise a cell culture system in which target RNA is expressed. In another embodiment, fragments of MAP kinase RNA are analyzed for detectable levels of cleavage, for example, by gel electrophoresis, northern blot analysis, or RNAse protection assays, to determine the most suitable target site(s) within the target MAP kinase RNA sequence. The target MAP kinase RNA sequence can be obtained as is known in the art, for example, by cloning and/or transcription for in vitro systems, and by cellular expression in in vivo systems.

[0154] In another embodiment, the invention features a method comprising: (a) analyzing the sequence of a RNA target encoded by a target gene; (b) synthesizing one or more sets of siNA molecules having sequence complementary to one or more regions of the RNA of (a); and (c) assaying the siNA molecules of (b) under conditions suitable to determine RNAi targets within the target RNA sequence. In one embodiment, the siNA molecules of (b) have strands of a fixed length, for example about 23 nucleotides in length. In another embodiment, the siNA molecules of (b) are of differing length, for example having strands of about 15 to about 30 (e.g., about 15, 16, 17, 18, 19, 20, 21, 22, 23, 24, 25, 26, 27, 28, 29, or 30) nucleotides in length. In one embodiment, the assay can comprise a reconstituted in vitro siNA assay as described herein. In another embodiment, the assay can comprise a cell culture system in which target RNA is expressed. Fragments of target RNA are analyzed for detectable levels of cleavage, for example by gel electrophoresis, northern blot analysis, or RNAse protection assays, to determine the most suitable target site(s) within the target RNA sequence. The target RNA sequence can be obtained as is known in the art, for example, by cloning and/or transcription for in vitro systems, and by expression in in vivo systems.

[0155] By “target site” is meant a sequence within a target RNA that is “targeted” for cleavage mediated by a siNA construct which contains sequences within its antisense region that are complementary to the target sequence.

[0156] By “detectable level of cleavage” is meant cleavage of target RNA (and formation of cleaved product RNAs) to an extent sufficient to discern cleavage products above the background of RNAs produced by random degradation of the target RNA. Production of cleavage products from 1-5% of the target RNA is sufficient to detect above the background for most methods of detection.

[0157] In one embodiment, the invention features a composition comprising a siNA molecule of the invention, which can be chemically-modified, in a pharmaceutically acceptable carrier or diluent. In another embodiment, the invention features a pharmaceutical composition comprising siNA molecules of the invention, which can be chemically-modified, targeting one or more genes in a pharmaceutically acceptable carrier or diluent. In another embodiment, the invention features a method for diagnosing a disease or condition in a subject comprising administering to the subject a composition of the invention under conditions suitable for the diagnosis of the disease or condition in the subject. In another embodiment, the invention features a method for treating or preventing a disease or condition in a subject, comprising administering to the subject a composition of the invention under conditions suitable for the treatment or prevention of the disease or condition in the subject, alone or in conjunction with one or more other therapeutic compounds. In yet another embodiment, the invention features a method for treating or preventing cancer, inflammatory, autoimmune, neuroligic, ocular, respiratory, allergic, and/or proliferative diseases, disorders and conditions in a subject or organism comprising administering to the subject a composition of the invention under conditions suitable for the treatment or prevention of cancer, inflammatory, autoimmune, neuroligic, ocular, respiratory, allergic, and/or proliferative diseases, disorders and conditions in the subject or organism.

[0158] In another embodiment, the invention features a method for validating a MAP kinase gene target, comprising: (a) synthesizing a siNA molecule of the invention, which can be chemically-modified, wherein one of the siNA strands includes a sequence complementary to RNA of a MAP kinase target gene; (b) introducing the siNA molecule into a cell, tissue, subject, or organism under conditions suitable for modulating expression of the MAP kinase target gene in the cell, tissue, subject, or organism; and (c) determining the function of the gene by assaying for any phenotypic change in the cell, tissue, subject, or organism.

[0159] In another embodiment, the invention features a method for validating a MAP kinase target comprising: (a) synthesizing a siNA molecule of the invention, which can be chemically-modified, wherein one of the siNA strands includes a sequence complementary to RNA of a MAP kinase target gene; (b) introducing the siNA molecule into a biological system under conditions suitable for modulating expression of the MAP kinase target gene in the biological system; and (c) determining the function of the gene by assaying for any phenotypic change in the biological system.

[0160] By “biological system” is meant, material, in a purified or unpurified form, from biological sources, including but not limited to human or animal, wherein the system comprises the components required for RNAi activity. The term “biological system” includes, for example, a cell, tissue, subject, or organism, or extract thereof. The term biological system also includes reconstituted RNAi systems that can be used in an in vitro setting.

[0161] By “phenotypic change” is meant any detectable change to a cell that occurs in response to contact or treatment with a nucleic acid molecule of the invention (e.g., siNA). Such detectable changes include, but are not limited to, changes in shape, size, proliferation, motility, protein expression or RNA expression or other physical or chemical changes as can be assayed by methods known in the art. The detectable change can also include expression of reporter genes/molecules such as Green Florescent Protein (GFP) or various tags that are used to identify an expressed protein or any other cellular component that can be assayed.

[0162] In one embodiment, the invention features a kit containing a siNA molecule of the invention, which can be chemically-modified, that can be used to modulate the expression of a MAP kinase target gene in a biological system, including, for example, in a cell, tissue, subject, or organism. In another embodiment, the invention features a kit containing more than one siNA molecule of the invention, which can be chemically-modified, that can be used to modulate the expression of more than one MAP kinase target gene in a biological system, including, for example, in a cell, tissue, subject, or organism.

[0163] In one embodiment, the invention features a cell containing one or more siNA molecules of the invention, which can be chemically-modified. In another embodiment, the cell containing a siNA molecule of the invention is a mammalian cell. In yet another embodiment, the cell containing a siNA molecule of the invention is a human cell.

[0164] In one embodiment, the synthesis of a siNA molecule of the invention, which can be chemically-modified, comprises: (a) synthesis of two complementary strands of the siNA molecule; (b) annealing the two complementary strands together under conditions suitable to obtain a double-stranded siNA molecule. In another embodiment, synthesis of the two complementary strands of the siNA molecule is by solid phase oligonucleotide synthesis. In yet another embodiment, synthesis of the two complementary strands of the siNA molecule is by solid phase tandem oligonucleotide synthesis.

[0165] In one embodiment, the invention features a method for synthesizing a siNA duplex molecule comprising: (a) synthesizing a first oligonucleotide sequence strand of the siNA molecule, wherein the first oligonucleotide sequence strand comprises a cleavable linker molecule that can be used as a scaffold for the synthesis of the second oligonucleotide sequence strand of the siNA; (b) synthesizing the second oligonucleotide sequence strand of siNA on the scaffold of the first oligonucleotide sequence strand, wherein the second oligonucleotide sequence strand further comprises a chemical moiety than can be used to purify the siNA duplex; (c) cleaving the linker molecule of (a) under conditions suitable for the two siNA oligonucleotide strands to hybridize and form a stable duplex; and (d) purifying the siNA duplex utilizing the chemical moiety of the second oligonucleotide sequence strand. In one embodiment, cleavage of the linker molecule in (c) above takes place during deprotection of the oligonucleotide, for example, under hydrolysis conditions using an alkylamine base such as methylamine. In one embodiment, the method of synthesis comprises solid phase synthesis on a solid support such as controlled pore glass (CPG) or polystyrene, wherein the first sequence of (a) is synthesized on a cleavable linker, such as a succinyl linker, using the solid support as a scaffold. The cleavable linker in (a) used as a scaffold for synthesizing the second strand can comprise similar reactivity as the solid support derivatized linker, such that cleavage of the solid support derivatized linker and the cleavable linker of (a) takes place concomitantly. In another embodiment, the chemical moiety of (b) that can be used to isolate the attached oligonucleotide sequence comprises a trityl group, for example a dimethoxytrityl group, which can be employed in a trityl-on synthesis strategy as described herein. In yet another embodiment, the chemical moiety, such as a dimethoxytrityl group, is removed during purification, for example, using acidic conditions.

[0166] In a further embodiment, the method for siNA synthesis is a solution phase synthesis or hybrid phase synthesis wherein both strands of the siNA duplex are synthesized in tandem using a cleavable linker attached to the first sequence which acts a scaffold for synthesis of the second sequence. Cleavage of the linker under conditions suitable for hybridization of the separate siNA sequence strands results in formation of the double-stranded siNA molecule.

[0167] In another embodiment, the invention features a method for synthesizing a siNA duplex molecule comprising: (a) synthesizing one oligonucleotide sequence strand of the siNA molecule, wherein the sequence comprises a cleavable linker molecule that can be used as a scaffold for the synthesis of another oligonucleotide sequence; (b) synthesizing a second oligonucleotide sequence having complementarity to the first sequence strand on the scaffold of (a), wherein the second sequence comprises the other strand of the double-stranded siNA molecule and wherein the second sequence further comprises a chemical moiety than can be used to isolate the attached oligonucleotide sequence; (c) purifying the product of (b) utilizing the chemical moiety of the second oligonucleotide sequence strand under conditions suitable for isolating the full-length sequence comprising both siNA oligonucleotide strands connected by the cleavable linker and under conditions suitable for the two siNA oligonucleotide strands to hybridize and form a stable duplex. In one embodiment, cleavage of the linker molecule in (c) above takes place during deprotection of the oligonucleotide, for example, under hydrolysis conditions. In another embodiment, cleavage of the linker molecule in (c) above takes place after deprotection of the oligonucleotide. In another embodiment, the method of synthesis comprises solid phase synthesis on a solid support such as controlled pore glass (CPG) or polystyrene, wherein the first sequence of (a) is synthesized on a cleavable linker, such as a succinyl linker, using the solid support as a scaffold. The cleavable linker in (a) used as a scaffold for synthesizing the second strand can comprise similar reactivity or differing reactivity as the solid support derivatized linker, such that cleavage of the solid support derivatized linker and the cleavable linker of (a) takes place either concomitantly or sequentially. In one embodiment, the chemical moiety of (b) that can be used to isolate the attached oligonucleotide sequence comprises a trityl group, for example a dimethoxytrityl group.

[0168] In another embodiment, the invention features a method for making a double-stranded siNA molecule in a single synthetic process comprising: (a) synthesizing an oligonucleotide having a first and a second sequence, wherein the first sequence is complementary to the second sequence, and the first oligonucleotide sequence is linked to the second sequence via a cleavable linker, and wherein a terminal 5′-protecting group, for example, a 5′-O-dimethoxytrityl group (5′-O-DMT) remains on the oligonucleotide having the second sequence; (b) deprotecting the oligonucleotide whereby the deprotection results in the cleavage of the linker joining the two oligonucleotide sequences; and (c) purifying the product of (b) under conditions suitable for isolating the double-stranded siNA molecule, for example using a trityl-on synthesis strategy as described herein.

[0169] In another embodiment, the method of synthesis of siNA molecules of the invention comprises the teachings of Scaringe et al., U.S. Pat. Nos. 5,889,136; 6,008,400; and 6,111,086, incorporated by reference herein in their entirety.

[0170] In one embodiment, the invention features siNA constructs that mediate RNAi against MAP kinase, wherein the siNA construct comprises one or more chemical modifications, for example, one or more chemical modifications having any of Formulae I-VII or any combination thereof that increases the nuclease resistance of the siNA construct.

[0171] In another embodiment, the invention features a method for generating siNA molecules with increased nuclease resistance comprising (a) introducing nucleotides having any of Formula I-VII or any combination thereof into a siNA molecule, and (b) assaying the siNA molecule of step (a) under conditions suitable for isolating siNA molecules having increased nuclease resistance.

[0172] In another embodiment, the invention features a method for generating siNA molecules with improved toxicologic profiles (e.g., have attenuated or no immunstimulatory properties) comprising (a) introducing nucleotides having any of Formula I-VII (e.g., siNA motifs referred to in Table IV) or any combination thereof into a siNA molecule, and (b) assaying the siNA molecule of step (a) under conditions suitable for isolating siNA molecules having improved toxicologic profiles.

[0173] In another embodiment, the invention features a method for generating siNA molecules that do not stimulate an interferon response (e.g., no interferon response or attenuated interferon response) in a cell, subject, or organism, comprising (a) introducing nucleotides having any of Formula I-VII (e.g., siNA motifs referred to in Table IV) or any combination thereof into a siNA molecule, and (b) assaying the siNA molecule of step (a) under conditions suitable for isolating siNA molecules that do not stimulate an interferon response.

[0174] By “improved toxicologic profile”, is meant that the chemically modified siNA construct exhibits decreased toxicity in a cell, subject, or organism compared to an unmodified siNA or siNA molecule having fewer modifications or modifications that are less effective in imparting improved toxicology. In a non-limiting example, siNA molecules with improved toxicologic profiles are associated with a decreased or attenuated immunostimulatory response in a cell, subject, or organism compared to an unmodified siNA or siNA molecule having fewer modifications or modifications that are less effective in imparting improved toxicology. In one embodiment, a siNA molecule with an improved toxicological profile comprises no ribonucleotides. In one embodiment, a siNA molecule with an improved toxicological profile comprises less than 5 ribonucleotides (e.g., 1, 2, 3, or 4 ribonucleotides). In one embodiment, a siNA molecule with an improved toxicological profile comprises Stab 7, Stab 8, Stab 11, Stab 12, Stab 13, Stab 16, Stab 17, Stab 18, Stab 19, Stab 20, Stab 23, Stab 24, Stab 25, Stab 26, Stab 27, Stab 28, Stab 29, Stab 30, Stab 31, Stab 32 or any combination thereof (see Table IV). In one embodiment, the level of immunostimulatory response associated with a given siNA molecule can be measured as is known in the art, for example by determining the level of PKR/interferon response, proliferation, B-cell activation, and/or cytokine production in assays to quantitate the immunostimulatory response of particular siNA molecules (see, for example, Leifer et al., 2003, J Immunother. 26, 313-9; and U.S. Pat. No. 5,968,909, incorporated in its entirety by reference).

[0175] In one embodiment, the invention features siNA constructs that mediate RNAi against MAP kinase, wherein the siNA construct comprises one or more chemical modifications described herein that modulates the binding affinity between the sense and antisense strands of the siNA construct.

[0176] In another embodiment, the invention features a method for generating siNA molecules with increased binding affinity between the sense and antisense strands of the siNA molecule comprising (a) introducing nucleotides having any of Formula I-VII or any combination thereof into a siNA molecule, and (b) assaying the siNA molecule of step (a) under conditions suitable for isolating siNA molecules having increased binding affinity between the sense and antisense strands of the siNA molecule.

[0177] In one embodiment, the invention features siNA constructs that mediate RNAi against MAP kinase, wherein the siNA construct comprises one or more chemical modifications described herein that modulates the binding affinity between the antisense strand of the siNA construct and a complementary target RNA sequence within a cell.

[0178] In one embodiment, the invention features siNA constructs that mediate RNAi against MAP kinase, wherein the siNA construct comprises one or more chemical modifications described herein that modulates the binding affinity between the antisense strand of the siNA construct and a complementary target DNA sequence within a cell.

[0179] In another embodiment, the invention features a method for generating siNA molecules with increased binding affinity between the antisense strand of the siNA molecule and a complementary target RNA sequence comprising (a) introducing nucleotides having any of Formula I-VII or any combination thereof into a siNA molecule, and (b) assaying the siNA molecule of step (a) under conditions suitable for isolating siNA molecules having increased binding affinity between the antisense strand of the siNA molecule and a complementary target RNA sequence.

[0180] In another embodiment, the invention features a method for generating siNA molecules with increased binding affinity between the antisense strand of the siNA molecule and a complementary target DNA sequence comprising (a) introducing nucleotides having any of Formula I-VII or any combination thereof into a siNA molecule, and (b) assaying the siNA molecule of step (a) under conditions suitable for isolating siNA molecules having increased binding affinity between the antisense strand of the siNA molecule and a complementary target DNA sequence.

[0181] In one embodiment, the invention features siNA constructs that mediate RNAi against MAP kinase, wherein the siNA construct comprises one or more chemical modifications described herein that modulate the polymerase activity of a cellular polymerase capable of generating additional endogenous siNA molecules having sequence homology to the chemically-modified siNA construct.

[0182] In another embodiment, the invention features a method for generating siNA molecules capable of mediating increased polymerase activity of a cellular polymerase capable of generating additional endogenous siNA molecules having sequence homology to a chemically-modified siNA molecule comprising (a) introducing nucleotides having any of Formula I-VII or any combination thereof into a siNA molecule, and (b) assaying the siNA molecule of step (a) under conditions suitable for isolating siNA molecules capable of mediating increased polymerase activity of a cellular polymerase capable of generating additional endogenous siNA molecules having sequence homology to the chemically-modified siNA molecule.

[0183] In one embodiment, the invention features chemically-modified siNA constructs that mediate RNAi against MAP kinase in a cell, wherein the chemical modifications do not significantly effect the interaction of siNA with a target RNA molecule, DNA molecule and/or proteins or other factors that are essential for RNAi in a manner that would decrease the efficacy of RNAi mediated by such siNA constructs.

[0184] In another embodiment, the invention features a method for generating siNA molecules with improved RNAi activity against MAP kinase comprising (a) introducing nucleotides having any of Formula I-VII or any combination thereof into a siNA molecule, and (b) assaying the siNA molecule of step (a) under conditions suitable for isolating siNA molecules having improved RNAi activity.

[0185] In yet another embodiment, the invention features a method for generating siNA molecules with improved RNAi activity against MAP kinase target RNA comprising (a) introducing nucleotides having any of Formula I-VII or any combination thereof into a siNA molecule, and (b) assaying the siNA molecule of step (a) under conditions suitable for isolating siNA molecules having improved RNAi activity against the target RNA.

[0186] In yet another embodiment, the invention features a method for generating siNA molecules with improved RNAi activity against MAP kinase target DNA comprising (a) introducing nucleotides having any of Formula I-VII or any combination thereof into a siNA molecule, and (b) assaying the siNA molecule of step (a) under conditions suitable for isolating siNA molecules having improved RNAi activity against the target DNA.

[0187] In one embodiment, the invention features siNA constructs that mediate RNAi against MAP kinase, wherein the siNA construct comprises one or more chemical modifications described herein that modulates the cellular uptake of the siNA construct.

[0188] In another embodiment, the invention features a method for generating siNA molecules against MAP kinase with improved cellular uptake comprising (a) introducing nucleotides having any of Formula I-VII or any combination thereof into a siNA molecule, and (b) assaying the siNA molecule of step (a) under conditions suitable for isolating siNA molecules having improved cellular uptake.

[0189] In one embodiment, the invention features siNA constructs that mediate RNAi against MAP kinase, wherein the siNA construct comprises one or more chemical modifications described herein that increases the bioavailability of the siNA construct, for example, by attaching polymeric conjugates such as polyethyleneglycol or equivalent conjugates that improve the pharmacokinetics of the siNA construct, or by attaching conjugates that target specific tissue types or cell types in vivo. Non-limiting examples of such conjugates are described in Vargeese et al., U.S. Ser. No. 10/201,394 incorporated by reference herein.

[0190] In one embodiment, the invention features a method for generating siNA molecules of the invention with improved bioavailability comprising (a) introducing a conjugate into the structure of a siNA molecule, and (b) assaying the siNA molecule of step (a) under conditions suitable for isolating siNA molecules having improved bioavailability. Such conjugates can include ligands for cellular receptors, such as peptides derived from naturally occurring protein ligands; protein localization sequences, including cellular ZIP code sequences; antibodies; nucleic acid aptamers; vitamins and other co-factors, such as folate and N-acetylgalactosamine; polymers, such as polyethyleneglycol (PEG); phospholipids; cholesterol; polyamines, such as spermine or spermidine; and others.

[0191] In one embodiment, the invention features a double stranded short interfering nucleic acid (siNA) molecule that comprises a first nucleotide sequence complementary to a target RNA sequence or a portion thereof, and a second sequence having complementarity to said first sequence, wherein said second sequence is chemically modified in a manner that it can no longer act as a guide sequence for efficiently mediating RNA interference and/or be recognized by cellular proteins that facilitate RNAi.

[0192] In one embodiment, the invention features a double stranded short interfering nucleic acid (siNA) molecule that comprises a first nucleotide sequence complementary to a target RNA sequence or a portion thereof, and a second sequence having complementarity to said first sequence, wherein the second sequence is designed or modified in a manner that prevents its entry into the RNAi pathway as a guide sequence or as a sequence that is complementary to a target nucleic acid (e.g., RNA) sequence. Such design or modifications are expected to enhance the activity of siNA and/or improve the specificity of siNA molecules of the invention. These modifications are also expected to minimize any off-target effects and/or associated toxicity.

[0193] In one embodiment, the invention features a double stranded short interfering nucleic acid (siNA) molecule that comprises a first nucleotide sequence complementary to a target RNA sequence or a portion thereof, and a second sequence having complementarity to said first sequence, wherein said second sequence is incapable of acting as a guide sequence for mediating RNA interference.

[0194] In one embodiment, the invention features a double stranded short interfering nucleic acid (siNA) molecule that comprises a first nucleotide sequence complementary to a target RNA sequence or a portion thereof, and a second sequence having complementarity to said first sequence, wherein said second sequence does not have a terminal 5′-hydroxyl (5′-OH) or 5′-phosphate group.

[0195] In one embodiment, the invention features a double stranded short interfering nucleic acid (siNA) molecule that comprises a first nucleotide sequence complementary to a target RNA sequence or a portion thereof, and a second sequence having complementarity to said first sequence, wherein said second sequence comprises a terminal cap moiety at the 5′-end of said second sequence. In one embodiment, the terminal cap moiety comprises an inverted abasic, inverted deoxy abasic, inverted nucleotide moiety, a group shown in FIG. 10, an alkyl or cycloalkyl group, a heterocycle, or any other group that prevents RNAi activity in which the second sequence serves as a guide sequence or template for RNAi.

[0196] In one embodiment, the invention features a double stranded short interfering nucleic acid (siNA) molecule that comprises a first nucleotide sequence complementary to a target RNA sequence or a portion thereof, and a second sequence having complementarity to said first sequence, wherein said second sequence comprises a terminal cap moiety at the 5′-end and 3′-end of said second sequence. In one embodiment, each terminal cap moiety individually comprises an inverted abasic, inverted deoxy abasic, inverted nucleotide moiety, a group shown in FIG. 10, an alkyl or cycloalkyl group, a heterocycle, or any other group that prevents RNAi activity in which the second sequence serves as a guide sequence or template for RNAi.

[0197] In one embodiment, the invention features a method for generating siNA molecules of the invention with improved specificity for down regulating or inhibiting the expression of a target nucleic acid (e.g., a DNA or RNA such as a gene or its corresponding RNA), comprising (a) introducing one or more chemical modifications into the structure of a siNA molecule, and (b) assaying the siNA molecule of step (a) under conditions suitable for isolating siNA molecules having improved specificity. In another embodiment, the chemical modification used to improve specificity comprises terminal cap modifications at the 5′-end, 3′-end, or both 5′ and 3′-ends of the siNA molecule. The terminal cap modifications can comprise, for example, structures shown in FIG. 10 (e.g. inverted deoxyabasic moieties) or any other chemical modification that renders a portion of the siNA molecule (e.g. the sense strand) incapable of mediating RNA interference against an off target nucleic acid sequence. In a non-limiting example, a siNA molecule is designed such that only the antisense sequence of the siNA molecule can serve as a guide sequence for RISC mediated degradation of a corresponding target RNA sequence. This can be accomplished by rendering the sense sequence of the siNA inactive by introducing chemical modifications to the sense strand that preclude recognition of the sense strand as a guide sequence by RNAi machinery. In one embodiment, such chemical modifications comprise any chemical group at the 5′-end of the sense strand of the siNA, or any other group that serves to render the sense strand inactive as a guide sequence for mediating RNA interference. These modifications, for example, can result in a molecule where the 5′-end of the sense strand no longer has a free 5′-hydroxyl (5′-OH) or a free 5′-phosphate group (e.g., phosphate, diphosphate, triphosphate, cyclic phosphate etc.). Non-limiting examples of such siNA constructs are described herein, such as “Stab 9/10”, “Stab 7/8”, “Stab 7/19”, “Stab 17/22”, “Stab 23/24”, “Stab 24/25”, and “Stab 24/26” (e.g., any siNA having Stab 7, 9, 17, 23, or 24 sense strands) chemistries and variants thereof (see Table IV) wherein the 5′-end and 3′-end of the sense strand of the siNA do not comprise a hydroxyl group or phosphate group.

[0198] In one embodiment, the invention features a method for generating siNA molecules of the invention with improved specificity for down regulating or inhibiting the expression of a target nucleic acid (e.g., a DNA or RNA such as a gene or its corresponding RNA), comprising introducing one or more chemical modifications into the structure of a siNA molecule that prevent a strand or portion of the siNA molecule from acting as a template or guide sequence for RNAi activity. In one embodiment, the inactive strand or sense region of the siNA molecule is the sense strand or sense region of the siNA molecule, i.e. the strand or region of the siNA that does not have complementarity to the target nucleic acid sequence. In one embodiment, such chemical modifications comprise any chemical group at the 5′-end of the sense strand or region of the siNA that does not comprise a 5′-hydroxyl (5′-OH) or 5′-phosphate group, or any other group that serves to render the sense strand or sense region inactive as a guide sequence for mediating RNA interference. Non-limiting examples of such siNA constructs are described herein, such as “Stab 9/10”, “Stab 7/8”, “Stab 7/19”, “Stab 17/22”, “Stab 23/24”, “Stab 24/25”, and “Stab 24/26” (e.g., any siNA having Stab 7, 9, 17, 23, or 24 sense strands) chemistries and variants thereof (see Table IV) wherein the 5′-end and 3′-end of the sense strand of the siNA do not comprise a hydroxyl group or phosphate group.

[0199] In one embodiment, the invention features a method for screening siNA molecules that are active in mediating RNA interference against a target nucleic acid sequence comprising (a) generating a plurality of unmodified siNA molecules, (b) screening the siNA molecules of step (a) under conditions suitable for isolating siNA molecules that are active in mediating RNA interference against the target nucleic acid sequence, and (c) introducing chemical modifications (e.g. chemical modifications as described herein or as otherwise known in the art) into the active siNA molecules of (b). In one embodiment, the method further comprises re-screening the chemically modified siNA molecules of step (c) under conditions suitable for isolating chemically modified siNA molecules that are active in mediating RNA interference against the target nucleic acid sequence.

[0200] In one embodiment, the invention features a method for screening chemically modified siNA molecules that are active in mediating RNA interference against a target nucleic acid sequence comprising (a) generating a plurality of chemically modified siNA molecules (e.g. siNA molecules as described herein or as otherwise known in the art), and (b) screening the siNA molecules of step (a) under conditions suitable for isolating chemically modified siNA molecules that are active in mediating RNA interference against the target nucleic acid sequence.

[0201] The term “ligand” refers to any compound or molecule, such as a drug, peptide, hormone, or neurotransmitter, that is capable of interacting with another compound, such as a receptor, either directly or indirectly. The receptor that interacts with a ligand can be present on the surface of a cell or can alternately be an intercellular receptor. Interaction of the ligand with the receptor can result in a biochemical reaction, or can simply be a physical interaction or association.

[0202] In another embodiment, the invention features a method for generating siNA molecules of the invention with improved bioavailability comprising (a) introducing an excipient formulation to a siNA molecule, and (b) assaying the siNA molecule of step (a) under conditions suitable for isolating siNA molecules having improved bioavailability. Such excipients include polymers such as cyclodextrins, lipids, cationic lipids, polyamines, phospholipids, nanoparticles, receptors, ligands, and others.

[0203] In another embodiment, the invention features a method for generating siNA molecules of the invention with improved bioavailability comprising (a) introducing nucleotides having any of Formulae I-VII or any combination thereof into a siNA molecule, and (b) assaying the siNA molecule of step (a) under conditions suitable for isolating siNA molecules having improved bioavailability.

[0204] In another embodiment, polyethylene glycol (PEG) can be covalently attached to siNA compounds of the present invention. The attached PEG can be any molecular weight, preferably from about 2,000 to about 50,000 daltons (Da).

[0205] The present invention can be used alone or as a component of a kit having at least one of the reagents necessary to carry out the in vitro or in vivo introduction of RNA to test samples and/or subjects. For example, preferred components of the kit include a siNA molecule of the invention and a vehicle that promotes introduction of the siNA into cells of interest as described herein (e.g., using lipids and other methods of transfection known in the art, see for example Beigelman et al, U.S. Pat. No. 6,395,713). The kit can be used for target validation, such as in determining gene function and/or activity, or in drug optimization, and in drug discovery (see for example Usman et al., U.S. Ser. No. 60/402,996). Such a kit can also include instructions to allow a user of the kit to practice the invention.

[0206] The term “short interfering nucleic acid”, “siNA”, “short interfering RNA”, “siRNA”, “short interfering nucleic acid molecule”, “short interfering oligonucleotide molecule”, or “chemically-modified short interfering nucleic acid molecule” as used herein refers to any nucleic acid molecule capable of inhibiting or down regulating gene expression or viral replication, for example by mediating RNA interference “RNAi” or gene silencing in a sequence-specific manner; see for example Zamore et al., 2000, Cell, 101, 25-33; Bass, 2001, Nature, 411, 428-429; Elbashir et al., 2001, Nature, 411, 494-498; and Kreutzer et al., International PCT Publication No. WO 00/44895; Zernicka-Goetz et al., International PCT Publication No. WO 01/36646; Fire, International PCT Publication No. WO 99/32619; Plaetinck et al., International PCT Publication No. WO 00/01846; Mello and Fire, International PCT Publication No. WO 01/29058; Deschamps-Depaillette, International PCT Publication No. WO 99/07409; and Li et al., International PCT Publication No. WO 00/44914; Allshire, 2002, Science, 297, 1818-1819; Volpe et al., 2002, Science, 297, 1833-1837; Jenuwein, 2002, Science, 297, 2215-2218; and Hall et al., 2002, Science, 297, 2232-2237; Hutvagner and Zamore, 2002, Science, 297, 2056-60; McManus et al., 2002, RNA, 8, 842-850; Reinhart et al., 2002, Gene & _i Dev., 16, 1616-1626; and Reinhart & Bartel, 2002, Science, 297, 1831). Non limiting examples of siNA molecules of the invention are shown in FIGS. 4-6, and Tables II and III herein. For example the siNA can be a double-stranded polynucleotide molecule comprising self-complementary sense and antisense regions, wherein the antisense region comprises nucleotide sequence that is complementary to nucleotide sequence in a target nucleic acid molecule or a portion thereof and the sense region having nucleotide sequence corresponding to the target nucleic acid sequence or a portion thereof. The siNA can be assembled from two separate oligonucleotides, where one strand is the sense strand and the other is the antisense strand, wherein the antisense and sense strands are self-complementary (i.e. each strand comprises nucleotide sequence that is complementary to nucleotide sequence in the other strand; such as where the antisense strand and sense strand form a duplex or double stranded structure, for example wherein the double stranded region is about 15 to about 30, e.g., about 15, 16, 17, 18, 19, 20, 21, 22, 23, 24, 25, 26, 27, 28, 29 or 30 base pairs; the antisense strand comprises nucleotide sequence that is complementary to nucleotide sequence in a target nucleic acid molecule or a portion thereof and the sense strand comprises nucleotide sequence corresponding to the target nucleic acid sequence or a portion thereof (e.g., about 15 to about 25 or more nucleotides of the siNA molecule are complementary to the target nucleic acid or a portion thereof). Alternatively, the siNA is assembled from a single oligonucleotide, where the self-complementary sense and antisense regions of the siNA are linked by means of a nucleic acid based or non-nucleic acid-based linker(s). The siNA can be a polynucleotide with a duplex, asymmetric duplex, hairpin or asymmetric hairpin secondary structure, having self-complementary sense and antisense regions, wherein the antisense region comprises nucleotide sequence that is complementary to nucleotide sequence in a separate target nucleic acid molecule or a portion thereof and the sense region having nucleotide sequence corresponding to the target nucleic acid sequence or a portion thereof. The siNA can be a circular single-stranded polynucleotide having two or more loop structures and a stem comprising self-complementary sense and antisense regions, wherein the antisense region comprises nucleotide sequence that is complementary to nucleotide sequence in a target nucleic acid molecule or a portion thereof and the sense region having nucleotide sequence corresponding to the target nucleic acid sequence or a portion thereof, and wherein the circular polynucleotide can be processed either in vivo or in vitro to generate an active siNA molecule capable of mediating RNAi. The siNA can also comprise a single stranded polynucleotide having nucleotide sequence complementary to nucleotide sequence in a target nucleic acid molecule or a portion thereof (for example, where such siNA molecule does not require the presence within the siNA molecule of nucleotide sequence corresponding to the target nucleic acid sequence or a portion thereof), wherein the single stranded polynucleotide can further comprise a terminal phosphate group, such as a 5′-phosphate (see for example Martinez et al., 2002, Cell., 110, 563-574 and Schwarz et al., 2002, Molecular Cell, 10, 537-568), or 5′,3′-diphosphate. In certain embodiments, the siNA molecule of the invention comprises separate sense and antisense sequences or regions, wherein the sense and antisense regions are covalently linked by nucleotide or non-nucleotide linkers molecules as is known in the art, or are alternately non-covalently linked by ionic interactions, hydrogen bonding, van der waals interactions, hydrophobic interactions, and/or stacking interactions. In certain embodiments, the siNA molecules of the invention comprise nucleotide sequence that is complementary to nucleotide sequence of a target gene. In another embodiment, the siNA molecule of the invention interacts with nucleotide sequence of a target gene in a manner that causes inhibition of expression of the target gene. As used herein, siNA molecules need not be limited to those molecules containing only RNA, but further encompasses chemically-modified nucleotides and non-nucleotides. In certain embodiments, the short interfering nucleic acid molecules of the invention lack 2′-hydroxy (2′-OH) containing nucleotides. Applicant describes in certain embodiments short interfering nucleic acids that do not require the presence of nucleotides having a 2′-hydroxy group for mediating RNAi and as such, short interfering nucleic acid molecules of the invention optionally do not include any ribonucleotides (e.g., nucleotides having a 2′-OH group). Such siNA molecules that do not require the presence of ribonucleotides within the siNA molecule to support RNAi can however have an attached linker or linkers or other attached or associated groups, moieties, or chains containing one or more nucleotides with 2′-OH groups. Optionally, siNA molecules can comprise ribonucleotides at about 5, 10, 20, 30, 40, or 50% of the nucleotide positions. The modified short interfering nucleic acid molecules of the invention can also be referred to as short interfering modified oligonucleotides “siMON.” As used herein, the term siNA is meant to be equivalent to other terms used to describe nucleic acid molecules that are capable of mediating sequence specific RNAi, for example short interfering RNA (siRNA), double-stranded RNA (dsRNA), micro-RNA (miRNA), short hairpin RNA (shRNA), short interfering oligonucleotide, short interfering nucleic acid, short interfering modified oligonucleotide, chemically-modified siRNA, post-transcriptional gene silencing RNA (ptgsRNA), and others. In addition, as used herein, the term RNAi is meant to be equivalent to other terms used to describe sequence specific RNA interference, such as post transcriptional gene silencing, translational inhibition, or epigenetics. For example, siNA molecules of the invention can be used to epigenetically silence genes at both the post-transcriptional level or the pre-transcriptional level. In a non-limiting example, epigenetic regulation of gene expression by siNA molecules of the invention can result from siNA mediated modification of chromatin structure or methylation pattern to alter gene expression (see, for example, Verdel et al., 2004, Science, 303, 672-676; Pal-Bhadra et al., 2004, Science, 303, 669-672; Allshire, 2002, Science, 297, 1818-1819; Volpe et al., 2002, Science, 297, 1833-1837; Jenuwein, 2002, Science, 297, 2215-2218; and Hall et al., 2002, Science, 297, 2232-2237).

[0207] In one embodiment, a siNA molecule of the invention is a duplex forming oligonucleotide “DFO”, (see for example FIGS. 14-15 and Vaish et al., U.S. Ser. No. 10/727,780 filed Dec. 3, 2003 and International PCT Application No. US04/16390, filed May 24, 2004).

[0208] In one embodiment, a siNA molecule of the invention is a multifunctional siNA, (see for example FIGS. 16-21 and Jadhav et al., U.S. Ser. No. 60/543,480 filed Feb. 10, 2004 and International PCT Application No. US04/16390, filed May 24, 2004). The multifunctional siNA of the invention can comprise sequence targeting, for example, two regions of MAP kinase RNA (see for example target sequences in Tables II and III).

[0209] By “asymmetric hairpin” as used herein is meant a linear siNA molecule comprising an antisense region, a loop portion that can comprise nucleotides or non-nucleotides, and a sense region that comprises fewer nucleotides than the antisense region to the extent that the sense region has enough complementary nucleotides to base pair with the antisense region and form a duplex with loop. For example, an asymmetric hairpin siNA molecule of the invention can comprise an antisense region having length sufficient to mediate RNAi in a cell or in vitro system (e.g. about 15 to about 30, or about 15, 16, 17, 18, 19, 20, 21, 22, 23, 24, 25, 26, 27, 28, 29, or 30 nucleotides) and a loop region comprising about 4 to about 12 (e.g., about 4, 5, 6, 7, 8, 9, 10, 11, or 12) nucleotides, and a sense region having about 3 to about 25 (e.g., about 3, 4, 5, 6, 7, 8, 9, 10, 11, 12, 13, 14, 15, 16, 17, 18, 19, 20, 21, 22, 23, 24, or 25) nucleotides that are complementary to the antisense region. The asymmetric hairpin siNA molecule can also comprise a 5′-terminal phosphate group that can be chemically modified. The loop portion of the asymmetric hairpin siNA molecule can comprise nucleotides, non-nucleotides, linker molecules, or conjugate molecules as described herein.

[0210] By “asymmetric duplex” as used herein is meant a siNA molecule having two separate strands comprising a sense region and an antisense region, wherein the sense region comprises fewer nucleotides than the antisense region to the extent that the sense region has enough complementary nucleotides to base pair with the antisense region and form a duplex. For example, an asymmetric duplex siNA molecule of the invention can comprise an antisense region having length sufficient to mediate RNAi in a cell or in vitro system (e.g. about 15 to about 30, or about 15, 16, 17, 18, 19, 20, 21, 22, 23, 24, 25, 26, 27, 28, 29, or 30 nucleotides) and a sense region having about 3 to about 25 (e.g., about 3, 4, 5, 6, 7, 8, 9, 10, 11, 12, 13, 14, 15, 16, 17, 18, 19, 20, 21, 22, 23, 24, or 25) nucleotides that are complementary to the antisense region.

[0211] By “modulate” is meant that the expression of the gene, or level of RNA molecule or equivalent RNA molecules encoding one or more proteins or protein subunits, or activity of one or more proteins or protein subunits is up regulated or down regulated, such that expression, level, or activity is greater than or less than that observed in the absence of the modulator. For example, the term “modulate” can mean “inhibit,” but the use of the word “modulate” is not limited to this definition.

[0212] By “inhibit”, “down-regulate”, or “reduce”, it is meant that the expression of the gene, or level of RNA molecules or equivalent RNA molecules encoding one or more proteins or protein subunits, or activity of one or more proteins or protein subunits, is reduced below that observed in the absence of the nucleic acid molecules (e.g., siNA) of the invention. In one embodiment, inhibition, down-regulation or reduction with an siNA molecule is below that level observed in the presence of an inactive or attenuated molecule. In another embodiment, inhibition, down-regulation, or reduction with siNA molecules is below that level observed in the presence of, for example, an siNA molecule with scrambled sequence or with mismatches. In another embodiment, inhibition, down-regulation, or reduction of gene expression with a nucleic acid molecule of the instant invention is greater in the presence of the nucleic acid molecule than in its absence. In one embodiment, inhibition, down regulation, or reduction of gene expression is associated with post transcriptional silencing, such as RNAi mediated cleavage of a target nucleic acid molecule (e.g. RNA) or inhibition of translation. In one embodiment, inhibition, down regulation, or reduction of gene expression is associated with pretranscriptional silencing.

[0213] By “gene”, or “target gene”, is meant a nucleic acid that encodes an RNA, for example, nucleic acid sequences including, but not limited to, structural genes encoding a polypeptide. A gene or target gene can also encode a functional RNA (FRNA) or non-coding RNA (ncRNA), such as small temporal RNA (stRNA), micro RNA (miRNA), small nuclear RNA (snRNA), short interfering RNA (siRNA), small nucleolar RNA (snRNA), ribosomal RNA (rRNA), transfer RNA (tRNA) and precursor RNAs thereof. Such non-coding RNAs can serve as target nucleic acid molecules for siNA mediated RNA interference in modulating the activity of FRNA or ncRNA involved in functional or regulatory cellular processes. Abberant FRNA or ncRNA activity leading to disease can therefore be modulated by siNA molecules of the invention. siNA molecules targeting FRNA and ncRNA can also be used to manipulate or alter the genotype or phenotype of a subject, organism or cell, by intervening in cellular processes such as genetic imprinting, transcription, translation, or nucleic acid processing (e.g., transamination, methylation etc.). The target gene can be a gene derived from a cell, an endogenous gene, a transgene, or exogenous genes such as genes of a pathogen, for example a virus, which is present in the cell after infection thereof. The cell containing the target gene can be derived from or contained in any organism, for example a plant, animal, protozoan, virus, bacterium, or fungus. Non-limiting examples of plants include monocots, dicots, or gymnosperms. Non-limiting examples of animals include vertebrates or invertebrates. Non-limiting examples of fungi include molds or yeasts. For a review, see for example Snyder and Gerstein, 2003, Science, 300, 258-260.

[0214] By “non-canonical base pair” is meant any non-Watson Crick base pair, such as mismatches and/or wobble base pairs, including flipped mismatches, single hydrogen bond mismatches, trans-type mismatches, triple base interactions, and quadruple base interactions. Non-limiting examples of such non-canonical base pairs include, but are not limited to, AC reverse Hoogsteen, AC wobble, AU reverse Hoogsteen, GU wobble, AA N7 amino, CC 2-carbonyl-amino(H1)-N3-amino(H2), GA sheared, UC 4-carbonyl-amino, UU imino-carbonyl, AC reverse wobble, AU Hoogsteen, AU reverse Watson Crick, CG reverse Watson Crick, GC N3-amino-amino N3, AA N1-amino symmetric, AA N7-amino symmetric, GA N7-N1 amino-carbonyl, GA+carbonyl-amino N7-N1, GG N1-carbonyl symmetric, GG N3-amino symmetric, CC carbonyl-amino symmetric, CC N3-amino symmetric, UU 2-carbonyl-imino symmetric, UU 4-carbonyl-imino symmetric, AA amino-N3, AA N1-amino, AC amino 2-carbonyl, AC N3-amino, AC N7-amino, AU amino-4-carbonyl, AU N1-imino, AU N3-imino, AU N7-imino, CC carbonyl-amino, GA amino-N1, GA amino-N7, GA carbonyl-amino, GA N3-amino, GC amino-N3, GC carbonyl-amino, GC N3-amino, GC N7-amino, GG amino-N7, GG carbonyl-imino, GG N7-amino, GU amino-2-carbonyl, GU carbonyl-imino, GU imino-2-carbonyl, GU N7-imino, psiU imino-2-carbonyl, UC 4-carbonyl-amino, UC imino-carbonyl, UU imino-4-carbonyl, AC C2-H—N3, GA carbonyl-C2-H, UU imino-4-carbonyl 2 carbonyl-C5-H, AC amino(A) N3(C)-carbonyl, GC imino amino-carbonyl, Gpsi imino-2-carbonyl amino-2-carbonyl, and GU imino amino-2-carbonyl base pairs.

[0215] By “MAP kinase” as used herein is meant, any mitogen activated protein kinase (MAP kinase) protein, peptide, or polypeptide having any MAP kinase activity, such as encoded by MAP kinase Genbank Accession Nos. shown in Table I or any other MAP kinase transcript derived from a MAP kinase gene, e.g., c-JUN, ERK1, ERK2, JNK1, JNK2, and/or p38. The term MAP kinase also refers to nucleic acid sequences encoding any MAP kinase protein (e.g., c-JUN, JNK1, JNK2, p38, ERK1, or ERK2), peptide, or polypeptide having MAP kinase activity. The term “MAP kinase” is also meant to include other MAP kinase encoding sequence, such as other MAP kinase (e.g., c-JUN, JNK1, JNK2, p38, ERK1, or ERK2) isoforms, mutant MAP kinase genes, splice variants of MAP kinase genes, and MAP kinase gene polymorphisms.

[0216] By “homologous sequence” is meant, a nucleotide sequence that is shared by one or more polynucleotide sequences, such as genes, gene transcripts and/or non-coding polynucleotides. For example, a homologous sequence can be a nucleotide sequence that is shared by two or more genes encoding related but different proteins, such as different members of a gene family, different protein epitopes, different protein isoforms or completely divergent genes, such as a cytokine and its corresponding receptors. A homologous sequence can be a nucleotide sequence that is shared by two or more non-coding polynucleotides, such as noncoding DNA or RNA, regulatory sequences, introns, and sites of transcriptional control or regulation. Homologous sequences can also include conserved sequence regions shared by more than one polynucleotide sequence. Homology does not need to be perfect homology (e.g., 100%), as partially homologous sequences are also contemplated by the instant invention (e.g., 99%, 98%, 97%, 96%, 95%, 94%, 93%, 92%, 91%, 90%, 89%, 88%, 87%, 86%, 85%, 84%, 83%, 82%, 81%, 80% etc.).

[0217] By “conserved sequence region” is meant, a nucleotide sequence of one or more regions in a polynucleotide does not vary significantly between generations or from one biological system, subject, or organism to another biological system, subject, or organism. The polynucleotide can include both coding and non-coding DNA and RNA.

[0218] By “sense region” is meant a nucleotide sequence of a siNA molecule having complementarity to an antisense region of the siNA molecule. In addition, the sense region of a siNA molecule can comprise a nucleic acid sequence having homology with a target nucleic acid sequence.

[0219] By “antisense region” is meant a nucleotide sequence of a siNA molecule having complementarity to a target nucleic acid sequence. In addition, the antisense region of a siNA molecule can optionally comprise a nucleic acid sequence having complementarity to a sense region of the siNA molecule.

[0220] By “target nucleic acid” is meant any nucleic acid sequence whose expression or activity is to be modulated. The target nucleic acid can be DNA or RNA.

[0221] By “complementarity” is meant that a nucleic acid can form hydrogen bond(s) with another nucleic acid sequence by either traditional Watson-Crick or other non-traditional types. In reference to the nucleic molecules of the present invention, the binding free energy for a nucleic acid molecule with its complementary sequence is sufficient to allow the relevant function of the nucleic acid to proceed, e.g., RNAi activity. Determination of binding free energies for nucleic acid molecules is well known in the art (see, e.g., Turner et al., 1987, CSH Symp. Quant. Biol. LII pp. 123-133; Frier et al., 1986, Proc. Nat. Acad. Sci. USA 83:9373-9377; Turner et al., 1987, J. Am. Chem. Soc. 109:3783-3785). A percent complementarity indicates the percentage of contiguous residues in a nucleic acid molecule that can form hydrogen bonds (e.g., Watson-Crick base pairing) with a second nucleic acid sequence (e.g., 5, 6, 7, 8, 9, or 10 nucleotides out of a total of 10 nucleotides in the first oligonucleotide being based paired to a second nucleic acid sequence having 10 nucleotides represents 50%, 60%, 70%, 80%, 90%, and 100% complementary respectively). “Perfectly complementary” means that all the contiguous residues of a nucleic acid sequence will hydrogen bond with the same number of contiguous residues in a second nucleic acid sequence. In one embodiment, a siNA molecule of the invention comprises about 15 to about 30 or more (e.g., about 15, 16, 17, 18, 19, 20, 21, 22, 23, 24, 25, 26, 27, 28, 29, or 30 or more) nucleotides that are complementary to one or more target nucleic acid molecules or a portion thereof.

[0222] In one embodiment, siNA molecules of the invention that down regulate or reduce MAP kinase gene expression are used for preventing or treating cancer, inflammatory, autoimmune, neuroligic, ocular, respiratory, allergic, and/or proliferative diseases, disorders, and/or conditions in a subject or organism.

[0223] In one embodiment, the siNA molecules of the invention are used to treat cancer, inflammatory, autoimmune, neuroligic, ocular, respiratory, allergic, and/or proliferative diseases, disorders, and/or conditions in a subject or organism.

[0224] By “proliferative disease” or “cancer” as used herein is meant, any disease, condition, trait, genotype or phenotype characterized by unregulated cell growth or replication as is known in the art; including AIDS related cancers such as Kaposi's sarcoma; breast cancers; bone cancers such as Osteosarcoma, Chondrosarcomas, Ewing's sarcoma, Fibrosarcomas, Giant cell tumors, Adamantinomas, and Chordomas; Brain cancers such as Meningiomas, Glioblastomas, Lower-Grade Astrocytomas, Oligodendrocytomas, Pituitary Tumors, Schwannomas, and Metastatic brain cancers; cancers of the head and neck including various lymphomas such as mantle cell lymphoma, non-Hodgkins lymphoma, adenoma, squamous cell carcinoma, laryngeal carcinoma, gallbladder and bile duct cancers, cancers of the retina such as retinoblastoma, cancers of the esophagus, gastric cancers, multiple myeloma, ovarian cancer, uterine cancer, thyroid cancer, testicular cancer, endometrial cancer, melanoma, colorectal cancer, lung cancer, bladder cancer, prostate cancer, lung cancer (including non-small cell lung carcinoma), pancreatic cancer, sarcomas, Wilms' tumor, cervical cancer, head and neck cancer, skin cancers, nasopharyngeal carcinoma, liposarcoma, epithelial carcinoma, renal cell carcinoma, gallbladder adeno carcinoma, parotid adenocarcinoma, endometrial sarcoma, multidrug resistant cancers; and proliferative diseases and conditions, such as neovascularization associated with tumor angiogenesis, macular degeneration (e.g., wet/dry AMD), corneal neovascularization, diabetic retinopathy, neovascular glaucoma, myopic degeneration and other proliferative diseases and conditions such as restenosis and polycystic kidney disease, and any other cancer or proliferative disease, condition, trait, genotype or phenotype that can respond to the modulation of disease related gene expression in a cell or tissue, alone or in combination with other therapies.

[0225] By “inflammatory disease” or “inflammatory condition” as used herein is meant any disease, condition, trait, genotype or phenotype characterized by an inflammatory or allergic process as is known in the art, such as inflammation, acute inflammation, chronic inflammation, respiratory disease, atherosclerosis, restenosis, asthma, allergic rhinitis, atopic dermatitis, septic shock, rheumatoid arthritis, inflammatory bowl disease, inflammatory pelvic disease, pain, ocular inflammatory disease, celiac disease, Leigh Syndrome, Glycerol Kinase Deficiency, Familial eosinophilia (FE), autosomal recessive spastic ataxia, laryngeal inflammatory disease; Tuberculosis, Chronic cholecystitis, Bronchiectasis, Silicosis and other pneumoconioses, and any other inflammatory disease, condition, trait, genotype or phenotype that can respond to the modulation of disease related gene expression in a cell or tissue, alone or in combination with other therapies.

[0226] By “autoimmune disease” or “autoimmune condition” as used herein is meant, any disease, condition, trait, genotype or phenotype characterized by autoimmunity as is known in the art, such as multiple sclerosis, diabetes mellitus, lupus, celiac disease, Crohn's disease, ulcerative colitis, Guillain-Barre syndrome, scleroderms, Goodpasture's syndrome, Wegener's granulomatosis, autoimmune epilepsy, Rasmussen's encephalitis, Primary biliary sclerosis, Sclerosing cholangitis, Autoimmune hepatitis, Addison's disease, Hashimoto's thyroiditis, Fibromyalgia, Menier's syndrome; transplantation rejection (e.g., prevention of allograft rejection) pernicious anemia, rheumatoid arthritis, systemic lupus erythematosus, dermatomyositis, Sjogren's syndrome, lupus erythematosus, multiple sclerosis, myasthenia gravis, Reiter's syndrome, Grave's disease, and any other autoimmune disease, condition, trait, genotype or phenotype that can respond to the modulation of disease related gene expression in a cell or tissue, alone or in combination with other therapies.

[0227] By “ocular disease” as used herein is meant, any disease, condition, trait, genotype or phenotype of the eye and related structures, such as Cystoid Macular Edema, Asteroid Hyalosis, Pathological Myopia and Posterior Staphyloma, Toxocariasis (Ocular Larva Migrans), Retinal Vein Occlusion, Posterior Vitreous Detachment, Tractional Retinal Tears, Epiretinal Membrane, Diabetic Retinopathy, Lattice Degeneration, Retinal Vein Occlusion, Retinal Artery Occlusion, Macular Degeneration (e.g., age related macular degeneration such as wet AMD or dry AMD), Toxoplasmosis, Choroidal Melanoma, Acquired Retinoschisis, Hollenhorst Plaque, Idiopathic Central Serous Chorioretinopathy, Macular Hole, Presumed Ocular Histoplasmosis Syndrome, Retinal Macroaneursym, Retinitis Pigmentosa, Retinal Detachment, Hypertensive Retinopathy, Retinal Pigment Epithelium (RPE) Detachment, Papillophlebitis, Ocular Ischemic Syndrome, Coats' Disease, Leber's Miliary Aneurysm, Conjunctival Neoplasms, Allergic Conjunctivitis, Vernal Conjunctivitis, Acute Bacterial Conjunctivitis, Allergic Conjunctivitis & Vernal Keratoconjunctivitis, Viral Conjunctivitis, Bacterial Conjunctivitis, Chlamydial & Gonococcal Conjunctivitis, Conjunctival Laceration, Episcleritis, Scleritis, Pingueculitis, Pterygium, Superior Limbic Keratoconjunctivitis (SLK of Theodore), Toxic Conjunctivitis, Conjunctivitis with Pseudomembrane, Giant Papillary Conjunctivitis, Terrien's Marginal Degeneration, Acanthamoeba Keratitis, Fungal Keratitis, Filamentary Keratitis, Bacterial Keratitis, Keratitis Sicca/Dry Eye Syndrome, Bacterial Keratitis, Herpes Simplex Keratitis, Sterile Corneal Infiltrates, Phlyctenulosis, Corneal Abrasion & Recurrent Corneal Erosion, Corneal Foreign Body, Chemical Burs, Epithelial Basement Membrane Dystrophy (EBMD), Thygeson's Superficial Punctate Keratopathy, Corneal Laceration, Salzmann's Nodular Degeneration, Fuchs' Endothelial Dystrophy, Crystalline Lens Subluxation, Ciliary-Block Glaucoma, Primary Open-Angle Glaucoma, Pigment Dispersion Syndrome and Pigmentary Glaucoma, Pseudoexfoliation Syndrom and Pseudoexfoliative Glaucoma, Anterior Uveitis, Primary Open Angle Glaucoma, Uveitic Glaucoma & Glaucomatocyclitic Crisis, Pigment Dispersion Syndrome & Pigmentary Glaucoma, Acute Angle Closure Glaucoma, Anterior Uveitis, Hyphema, Angle Recession Glaucoma, Lens Induced Glaucoma, Pseudoexfoliation Syndrome and Pseudoexfoliative Glaucoma, Axenfeld-Rieger Syndrome, Neovascular Glaucoma, Pars Planitis, Choroidal Rupture, Duane's Retraction Syndrome, Toxic/Nutritional Optic Neuropathy, Aberrant Regeneration of Cranial Nerve III, Intracranial Mass Lesions, Carotid-Cavernous Sinus Fistula, Anterior Ischemic Optic Neuropathy, Optic Disc Edema & Papilledema, Cranial Nerve III Palsy, Cranial Nerve IV Palsy, Cranial Nerve VI Palsy, Cranial Nerve VII (Facial Nerve) Palsy, Horner's Syndrome, Internuclear Opthalmoplegia, Optic Nerve Head Hypoplasia, Optic Pit, Tonic Pupil, Optic Nerve Head Drusen, Demyelinating Optic Neuropathy (Optic Neuritis, Retrobulbar Optic Neuritis), Amaurosis Fugax and Transient Ischemic Attack, Pseudotumor Cerebri, Pituitary Adenoma, Molluscum Contagiosum, Canaliculitis, Verruca and Papilloma, Pediculosis and Pthiriasis, Blepharitis, Hordeolum, Preseptal Cellulitis, Chalazion, Basal Cell Carcinoma, Herpes Zoster Ophthalmicus, Pediculosis & Phthiriasis, Blow-out Fracture, Chronic Epiphora, Dacryocystitis, Herpes Simplex Blepharitis, Orbital Cellulitis, Senile Entropion, and Squamous Cell Carcinoma.

[0228] By “nuerologic disease” or “neurological disease” is meant any disease, disorder, or condition affecting the central or peripheral nervous system, inlcuding ADHD, AIDS—Neurological Complications, Absence of the Septum Pellucidum, Acquired Epileptiform Aphasia, Acute Disseminated Encephalomyelitis, Adrenoleukodystrophy, Agenesis of the Corpus Callosum, Agnosia, Aicardi Syndrome, Alexander Disease, Alpers' Disease, Alternating Hemiplegia, Alzheimer's Disease, Amyotrophic Lateral Sclerosis, Anencephaly, Aneurysm, Angelman Syndrome, Angiomatosis, Anoxia, Aphasia, Apraxia, Arachnoid Cysts, Arachnoiditis, Arnold-Chiari Malformation, Arteriovenous Malformation, Aspartame, Asperger Syndrome, Ataxia Telangiectasia, Ataxia, Attention Deficit-Hyperactivity Disorder, Autism, Autonomic Dysfunction, Back Pain, Barth Syndrome, Batten Disease, Behcet's Disease, Bell's Palsy, Benign Essential Blepharospasm, Benign Focal Amyotrophy, Benign Intracranial Hypertension, Bernhardt-Roth Syndrome, Binswanger's Disease, Blepharospasm, Bloch-Sulzberger Syndrome, Brachial Plexus Birth Injuries, Brachial Plexus Injuries, Bradbury-Eggleston Syndrome, Brain Aneurysm, Brain Injury, Brain and Spinal Tumors, Brown-Sequard Syndrome, Bulbospinal Muscular Atrophy, Canavan Disease, Carpal Tunnel Syndrome, Causalgia, Cavernomas, Cavernous Angioma, Cavernous Malformation, Central Cervical Cord Syndrome, Central Cord Syndrome, Central Pain Syndrome, Cephalic Disorders, Cerebellar Degeneration, Cerebellar Hypoplasia, Cerebral Aneurysm, Cerebral Arteriosclerosis, Cerebral Atrophy, Cerebral Beriberi, Cerebral Gigantism, Cerebral Hypoxia, Cerebral Palsy, Cerebro-Oculo-Facio-Skeletal Syndrome, Charcot-Marie-Tooth Disorder, Chiari Malformation, Chorea, Choreoacanthocytosis, Chronic Inflammatory Demyelinating Polyneuropathy (CIDP), Chronic Orthostatic Intolerance, Chronic Pain, Cockayne Syndrome Type II, Coffin Lowry Syndrome, Coma, including Persistent Vegetative State, Complex Regional Pain Syndrome, Congenital Facial Diplegia, Congenital Myasthenia, Congenital Myopathy, Congenital Vascular Cavernous Malformations, Corticobasal Degeneration, Cranial Arteritis, Craniosynostosis, Creutzfeldt-Jakob Disease, Cumulative Trauma Disorders, Cushing's Syndrome, Cytomegalic Inclusion Body Disease (CIBD), Cytomegalovirus Infection, Dancing Eyes-Dancing Feet Syndrome, Dandy-Walker Syndrome, Dawson Disease, De Morsier's Syndrome, Dejerine-Klumpke Palsy, Dementia—Multi-Infarct, Dementia—Subcortical, Dementia With Lewy Bodies, Dermatomyositis, Developmental Dyspraxia, Devic's Syndrome, Diabetic Neuropathy, Diffuse Sclerosis, Dravet's Syndrome, Dysautonomia, Dysgraphia, Dyslexia, Dysphagia, Dyspraxia, Dystonias, Early Infantile Epileptic Encephalopathy, Empty Sella Syndrome, Encephalitis Lethargica, Encephalitis and Meningitis, Encephaloceles, Encephalopathy, Encephalotrigeminal Angiomatosis, Epilepsy, Erb's Palsy, Erb-Duchenne and Dejerine-Klumpke Palsies, Fabry's Disease, Fahr's Syndrome, Fainting, Familial Dysautonomia, Familial Hemangioma, Familial Idiopathic Basal Ganglia Calcification, Familial Spastic Paralysis, Febrile Seizures (e.g., GEFS and GEFS plus), Fisher Syndrome, Floppy Infant Syndrome, Friedreich's Ataxia, Gaucher's Disease, Gerstmann's Syndrome, Gerstmann-Straussler-Scheinker Disease, Giant Cell Arteritis, Giant Cell Inclusion Disease, Globoid Cell Leukodystrophy, Glossopharyngeal Neuralgia, Guillain-Barre Syndrome, HTLV-1 Associated Myelopathy, Hallervorden-Spatz Disease, Head Injury, Headache, Hemicrania Continua, Hemifacial Spasm, Hemiplegia Alterans, Hereditary Neuropathies, Hereditary Spastic Paraplegia, Heredopathia Atactica Polyneuritiformis, Herpes Zoster Oticus, Herpes Zoster, Hirayama Syndrome, Holoprosencephaly, Huntington's Disease, ydranencephaly, Hydrocephalus—Normal Pressure, Hydrocephalus, Hydromyelia, Hypercortisolism, Hypersomnia, Hypertonia, Hypotonia, Hypoxia, Immune-Mediated Encephalomyelitis, Inclusion Body Myositis, Incontinentia Pigmenti, Infantile Hypotonia, Infantile Phytanic Acid Storage Disease, Infantile Refsum Disease, Infantile Spasms, Inflammatory Myopathy, Intestinal Lipodystrophy, Intracranial Cysts, Intracranial Hypertension, Isaac's Syndrome, Joubert Syndrome, Kearns-Sayre Syndrome, Kennedy's Disease, Kinsbourne syndrome, Kleine-Levin syndrome, Klippel Feil Syndrome, Klippel-Trenaunay Syndrome (KTS), Klüver-Bucy Syndrome, Korsakoffs Amnesic Syndrome, Krabbe Disease, Kugelberg-Welander Disease, Kuru, Lambert-Eaton Myasthenic Syndrome, Landau-Kleffner Syndrome, Lateral Femoral Cutaneous Nerve Entrapment, Lateral Medullary Syndrome, Learning Disabilities, Leigh's Disease, Lennox-Gastaut Syndrome, Lesch-Nyhan Syndrome, Leukodystrophy, Levine-Critchley Syndrome, Lewy Body Dementia, Lissencephaly, Locked-In Syndrome, Lou Gehrig's Disease, Lupus—Neurological Sequelae, Lyme Disease—Neurological Complications, Machado-Joseph Disease, Macrencephaly, Megalencephaly, Melkersson-Rosenthal Syndrome, Meningitis, Menkes Disease, Meralgia Paresthetica, Metachromatic Leukodystrophy, Microcephaly, Migraine, Miller Fisher Syndrome, Mini-Strokes, Mitochondrial Myopathies, Mobius Syndrome, Monomelic Amyotrophy, Motor Neuron Diseases, Moyamoya Disease, Mucolipidoses, Mucopolysaccharidoses, Multi-Infarct Dementia, Multifocal Motor Neuropathy, Multiple Sclerosis, Multiple System Atrophy with Orthostatic Hypotension, Multiple System Atrophy, Muscular Dystrophy, Myasthenia—Congenital, Myasthenia Gravis, Myelinoclastic Diffuse Sclerosis, Myoclonic Encephalopathy of Infants, Myoclonus, Myopathy—Congenital, Myopathy—Thyrotoxic, Myopathy, Myotonia Congenita, Myotonia, Narcolepsy, Neuroacanthocytosis, Neurodegeneration with Brain Iron Accumulation, Neurofibromatosis, Neuroleptic Malignant Syndrome, Neurological Complications of AIDS, Neurological Manifestations of Pompe Disease, Neuromyelitis Optica, Neuromyotonia, Neuronal Ceroid Lipofuscinosis, Neuronal Migration Disorders, Neuropathy—Hereditary, Neurosarcoidosis, Neurotoxicity, Nevus Cavernosus, Niemann-Pick Disease, O'Sullivan-McLeod Syndrome, Occipital Neuralgia, Occult Spinal Dysraphism Sequence, Ohtahara Syndrome, Olivopontocerebellar Atrophy, Opsoclonus Myoclonus, Orthostatic Hypotension, Overuse Syndrome, Pain—Chronic, Paraneoplastic Syndromes, Paresthesia, Parkinson's Disease, Parmyotonia Congenita, Paroxysmal Choreoathetosis, Paroxysmal Hemicrania, Parry-Romberg, Pelizaeus-Merzbacher Disease, Pena Shokeir II Syndrome, Perineural Cysts, Periodic Paralyses, Peripheral Neuropathy, Periventricular Leukomalacia, Persistent Vegetative State, Pervasive Developmental Disorders, Phytanic Acid Storage Disease, Pick's Disease, Piriformis Syndrome, Pituitary Tumors, Polymyositis, Pompe Disease, Porencephaly, Post-Polio Syndrome, Postherpetic Neuralgia, Postinfectious Encephalomyelitis, Postural Hypotension, Postural Orthostatic Tachycardia Syndrome, Postural Tachycardia Syndrome, Primary Lateral Sclerosis, Prion Diseases, Progressive Hemifacial Atrophy, Progressive Locomotor Ataxia, Progressive Multifocal Leukoencephalopathy, Progressive Sclerosing Poliodystrophy, Progressive Supranuclear Palsy, Pseudotumor Cerebri, Pyridoxine Dependent and Pyridoxine Responsive Siezure Disorders, Ramsay Hunt Syndrome Type I, Ramsay Hunt Syndrome Type II, Rasmussen's Encephalitis and other autoimmune epilepsies, Reflex Sympathetic Dystrophy Syndrome, Refsum Disease—Infantile, Refsum Disease, Repetitive Motion Disorders, Repetitive Stress Injuries, Restless Legs Syndrome, Retrovirus-Associated Myelopathy, Rett Syndrome, Reye's Syndrome, Riley-Day Syndrome, SUNCT Headache, Sacral Nerve Root Cysts, Saint Vitus Dance, Salivary Gland Disease, Sandhoff Disease, Schilder's Disease, Schizencephaly, Seizure Disorders, Septo-Optic Dysplasia, Severe Myoclonic Epilepsy of Infancy (SMEI), Shaken Baby Syndrome, Shingles, Shy-Drager Syndrome, Sjogren's Syndrome, Sleep Apnea, Sleeping Sickness, Soto's Syndrome, Spasticity, Spina Bifida, Spinal Cord Infarction, Spinal Cord Injury, Spinal Cord Tumors, Spinal Muscular Atrophy, Spinocerebellar Atrophy, Steele-Richardson-Olszewski Syndrome, Stiff-Person Syndrome, Striatonigral Degeneration, Stroke, Sturge-Weber Syndrome, Subacute Sclerosing Panencephalitis, Subcortical Arteriosclerotic Encephalopathy, Swallowing Disorders, Sydenham Chorea, Syncope, Syphilitic Spinal Sclerosis, Syringohydromyelia, Syringomyelia, Systemic Lupus Erythematosus, Tabes Dorsalis, Tardive Dyskinesia, Tarlov Cysts, Tay-Sachs Disease, Temporal Arteritis, Tethered Spinal Cord Syndrome, Thomsen Disease, Thoracic Outlet Syndrome, Thyrotoxic Myopathy, Tic Douloureux, Todd's Paralysis, Tourette Syndrome, Transient Ischemic Attack, Transmissible Spongiform Encephalopathies, Transverse Myelitis, Traumatic Brain Injury, Tremor, Trigeminal Neuralgia, Tropical Spastic Paraparesis, Tuberous Sclerosis, Vascular Erectile Tumor, Vasculitis including Temporal Arteritis, Von Economo's Disease, Von Hippel-Lindau disease (VHL), Von Recklinghausen's Disease, Wallenberg's Syndrome, Werdnig-Hoffman Disease, Wernicke-Korsakoff Syndrome, West Syndrome, Whipple's Disease, Williams Syndrome, Wilson's Disease, X-Linked Spinal and Bulbar Muscular Atrophy, and Zellweger Syndrome.

[0229] By “respiratory disease” is meant, any disease or condition affecting the respiratory tract, such as asthma, chronic obstructive pulmonary disease or “COPD”, allergic rhinitis, sinusitis, pulmonary vasoconstriction, inflammation, allergies, impeded respiration, respiratory distress syndrome, cystic fibrosis, pulmonary hypertension, pulmonary vasoconstriction, emphysema, and any other respiratory disease, condition, trait, genotype or phenotype that can respond to the modulation of disease related gene expression in a cell or tissue, alone or in combination with other therapies.

[0230] In one embodiment of the present invention, each sequence of a siNA molecule of the invention is independently about 15 to about 30 nucleotides in length, in specific embodiments about 15, 16, 17, 18, 19, 20, 21, 22, 23, 24, 25, 26, 27, 28, 29, or 30 nucleotides in length. In another embodiment, the siNA duplexes of the invention independently comprise about 15 to about 30 base pairs (e.g., about 15, 16, 17, 18, 19, 20, 21, 22, 23, 24, 25, 26, 27, 28, 29, or 30). In another embodiment, one or more strands of the siNA molecule of the invention independently comprises about 15 to about 30 nucleotides (e.g., about 15, 16, 17, 18, 19, 20, 21, 22, 23, 24, 25, 26, 27, 28, 29, or 30) that are complementary to a target nucleic acid molecule. In yet another embodiment, siNA molecules of the invention comprising hairpin or circular structures are about 35 to about 55 (e.g., about 35, 40, 45, 50 or 55) nucleotides in length, or about 38 to about 44 (e.g., about 38, 39, 40, 41, 42, 43, or 44) nucleotides in length and comprising about 15 to about 25 (e.g., about 15, 16, 17, 18, 19, 20, 21, 22, 23, 24, or 25) base pairs. Exemplary siNA molecules of the invention are shown in Table II. Exemplary synthetic siNA molecules of the invention are shown in Table III and/or FIGS. 4-5.

[0231] As used herein “cell” is used in its usual biological sense, and does not refer to an entire multicellular organism, e.g., specifically does not refer to a human. The cell can be present in an organism, e.g., birds, plants and mammals such as humans, cows, sheep, apes, monkeys, swine, dogs, and cats. The cell can be prokaryotic (e.g., bacterial cell) or eukaryotic (e.g., mammalian or plant cell). The cell can be of somatic or germ line origin, totipotent or pluripotent, dividing or non-dividing. The cell can also be derived from or can comprise a gamete or embryo, a stem cell, or a fully differentiated cell.

[0232] The siNA molecules of the invention are added directly, or can be complexed with cationic lipids, packaged within liposomes, or otherwise delivered to target cells or tissues. The nucleic acid or nucleic acid complexes can be locally administered to relevant tissues ex vivo, or in vivo through direct dermal application, transdermal application, or injection, with or without their incorporation in biopolymers. In particular embodiments, the nucleic acid molecules of the invention comprise sequences shown in Tables II-III and/or FIGS. 4-5. Examples of such nucleic acid molecules consist essentially of sequences defined in these tables and figures. Furthermore, the chemically modified constructs described in Table IV can be applied to any siNA sequence of the invention.

[0233] In another aspect, the invention provides mammalian cells containing one or more siNA molecules of this invention. The one or more siNA molecules can independently be targeted to the same or different sites.

[0234] By “RNA” is meant a molecule comprising at least one ribonucleotide residue. By “ribonucleotide” is meant a nucleotide with a hydroxyl group at the 2′ position of a β-D-ribofuranose moiety. The terms include double-stranded RNA, single-stranded RNA, isolated RNA such as partially purified RNA, essentially pure RNA, synthetic RNA, recombinantly produced RNA, as well as altered RNA that differs from naturally occurring RNA by the addition, deletion, substitution and/or alteration of one or more nucleotides. Such alterations can include addition of non-nucleotide material, such as to the end(s) of the siNA or internally, for example at one or more nucleotides of the RNA. Nucleotides in the RNA molecules of the instant invention can also comprise non-standard nucleotides, such as non-naturally occurring nucleotides or chemically synthesized nucleotides or deoxynucleotides. These altered RNAs can be referred to as analogs or analogs of naturally-occurring RNA.

[0235] By “subject” is meant an organism, which is a donor or recipient of explanted cells or the cells themselves. “Subject” also refers to an organism to which the nucleic acid molecules of the invention can be administered. A subject can be a mammal or mammalian cells, including a human or human cells.

[0236] The term “phosphorothioate” as used herein refers to an internucleotide linkage having Formula I, wherein Z and/or W comprise a sulfur atom. Hence, the term phosphorothioate refers to both phosphorothioate and phosphorodithioate internucleotide linkages.

[0237] The term “phosphonoacetate” as used herein refers to an internucleotide linkage having Formula I, wherein Z and/or W comprise an acetyl or protected acetyl group.

[0238] The term “thiophosphonoacetate” as used herein refers to an internucleotide linkage having Formula I, wherein Z comprises an acetyl or protected acetyl group and W comprises a sulfur atom or alternately W comprises an acetyl or protected acetyl group and Z comprises a sulfur atom.

[0239] The term “universal base” as used herein refers to nucleotide base analogs that form base pairs with each of the natural DNA/RNA bases with little discrimination between them. Non-limiting examples of universal bases include C-phenyl, C-naphthyl and other aromatic derivatives, inosine, azole carboxamides, and nitroazole derivatives such as 3-nitropyrrole, 4-nitroindole, 5-nitroindole, and 6-nitroindole as known in the art (see for example Loakes, 2001, Nucleic Acids Research, 29, 2437-2447).

[0240] The term “acyclic nucleotide” as used herein refers to any nucleotide having an acyclic ribose sugar, for example where any of the ribose carbons (C1, C2, C3, C4, or C5), are independently or in combination absent from the nucleotide.

[0241] The nucleic acid molecules of the instant invention, individually, or in combination or in conjunction with other drugs, can be used to for preventing or treating cancer, inflammatory, autoimmune, allergicc, or proliferative diseases, conditions, or disorders in a subject or organism.

[0242] For example, the siNA molecules can be administered to a subject or can be administered to other appropriate cells evident to those skilled in the art, individually or in combination with one or more drugs under conditions suitable for the treatment.

[0243] In a further embodiment, the siNA molecules can be used in combination with other known treatments to prevent or treat cancer, inflammatory, autoimmune, neuroligic, ocular, respiratory, allergic, and/or proliferative diseases, conditions, or disorders in a subject or organism. For example, the described molecules could be used in combination with one or more known compounds, treatments, or procedures to prevent or treat cancer, inflammatory, autoimmune, neuroligic, ocular, respiratory, allergic, and/or proliferative diseases, conditions, or disorders in a subject or organism as are known in the art.

[0244] In one embodiment, the invention features an expression vector comprising a nucleic acid sequence encoding at least one siNA molecule of the invention, in a manner which allows expression of the siNA molecule. For example, the vector can contain sequence(s) encoding both strands of a siNA molecule comprising a duplex. The vector can also contain sequence(s) encoding a single nucleic acid molecule that is self-complementary and thus forms a siNA molecule. Non-limiting examples of such expression vectors are described in Paul et al., 2002, Nature Biotechnology, 19, 505; Miyagishi and Taira, 2002, Nature Biotechnology, 19, 497; Lee et al., 2002, Nature Biotechnology, 19, 500; and Novina et al., 2002, Nature Medicine, advance online publication doi: 10.1038/nm725.

[0245] In another embodiment, the invention features a mammalian cell, for example, a human cell, including an expression vector of the invention.

[0246] In yet another embodiment, the expression vector of the invention comprises a sequence for a siNA molecule having complementarity to a RNA molecule referred to by a Genbank Accession numbers, for example Genbank Accession Nos. shown in Table I.

[0247] In one embodiment, an expression vector of the invention comprises a nucleic acid sequence encoding two or more siNA molecules, which can be the same or different.

[0248] In another aspect of the invention, siNA molecules that interact with target RNA molecules and down-regulate gene encoding target RNA molecules (for example target RNA molecules referred to by Genbank Accession numbers herein) are expressed from transcription units inserted into DNA or RNA vectors. The recombinant vectors can be DNA plasmids or viral vectors. siNA expressing viral vectors can be constructed based on, but not limited to, adeno-associated virus, retrovirus, adenovirus, or alphavirus. The recombinant vectors capable of expressing the siNA molecules can be delivered as described herein, and persist in target cells. Alternatively, viral vectors can be used that provide for transient expression of siNA molecules. Such vectors can be repeatedly administered as necessary. Once expressed, the siNA molecules bind and down-regulate gene function or expression via RNA interference (RNAi). Delivery of siNA expressing vectors can be systemic, such as by intravenous or intramuscular administration, by administration to target cells ex-planted from a subject followed by reintroduction into the subject, or by any other means that would allow for introduction into the desired target cell.

[0249] By “vectors” is meant any nucleic acid- and/or viral-based technique used to deliver a desired nucleic acid.

[0250] Other features and advantages of the invention will be apparent from the following description of the preferred embodiments thereof, and from the claims.

### BRIEF DESCRIPTION OF THE DRAWINGS

[0251] FIG. 1 shows a non-limiting example of a scheme for the synthesis of siNA molecules. The complementary siNA sequence strands, strand 1 and strand 2, are synthesized in tandem and are connected by a cleavable linkage, such as a nucleotide succinate or abasic succinate, which can be the same or different from the cleavable linker used for solid phase synthesis on a solid support. The synthesis can be either solid phase or solution phase, in the example shown, the synthesis is a solid phase synthesis. The synthesis is performed such that a protecting group, such as a dimethoxytrityl group, remains intact on the terminal nucleotide of the tandem oligonucleotide. Upon cleavage and deprotection of the oligonucleotide, the two siNA strands spontaneously hybridize to form a siNA duplex, which allows the purification of the duplex by utilizing the properties of the terminal protecting group, for example by applying a trityl on purification method wherein only duplexes/oligonucleotides with the terminal protecting group are isolated.

[0252] FIG. 2 shows a MALDI-TOF mass spectrum of a purified siNA duplex synthesized by a method of the invention. The two peaks shown correspond to the predicted mass of the separate siNA sequence strands. This result demonstrates that the siNA duplex generated from tandem synthesis can be purified as a single entity using a simple trityl-on purification methodology.

[0253] FIG. 3 shows a non-limiting proposed mechanistic representation of target RNA degradation involved in RNAi. Double-stranded RNA (dsRNA), which is generated by RNA-dependent RNA polymerase (RdRP) from foreign single-stranded RNA, for example viral, transposon, or other exogenous RNA, activates the DICER enzyme that in turn generates siNA duplexes. Alternately, synthetic or expressed siNA can be introduced directly into a cell by appropriate means. An active siNA complex forms which recognizes a target RNA, resulting in degradation of the target RNA by the RISC endonuclease complex or in the synthesis of additional RNA by RNA-dependent RNA polymerase (RdRP), which can activate DICER and result in additional siNA molecules, thereby amplifying the RNAi response.

[0254] FIG. 4A-F shows non-limiting examples of chemically-modified siNA constructs of the present invention. In the figure, N stands for any nucleotide (adenosine, guanosine, cytosine, uridine, or optionally thymidine, for example thymidine can be substituted in the overhanging regions designated by parenthesis (N N). Various modifications are shown for the sense and antisense strands of the siNA constructs.

[0255] FIG. 4A: The sense strand comprises 21 nucleotides wherein the two terminal 3′-nucleotides are optionally base paired and wherein all nucleotides present are ribonucleotides except for (N N) nucleotides, which can comprise ribonucleotides, deoxynucleotides, universal bases, or other chemical modifications described herein. The antisense strand comprises 21 nucleotides, optionally having a 3′-terminal glyceryl moiety wherein the two terminal 3′-nucleotides are optionally complementary to the target RNA sequence, and wherein all nucleotides present are ribonucleotides except for (N N) nucleotides, which can comprise ribonucleotides, deoxynucleotides, universal bases, or other chemical modifications described herein. A modified internucleotide linkage, such as a phosphorothioate, phosphorodithioate or other modified internucleotide linkage as described herein, shown as “s”, optionally connects the (N N) nucleotides in the antisense strand.

[0256] FIG. 4B: The sense strand comprises 21 nucleotides wherein the two terminal 3′-nucleotides are optionally base paired and wherein all pyrimidine nucleotides that may be present are 2′deoxy-2′-fluoro modified nucleotides and all purine nucleotides that may be present are 2′-O-methyl modified nucleotides except for (N N) nucleotides, which can comprise ribonucleotides, deoxynucleotides, universal bases, or other chemical modifications described herein. The antisense strand comprises 21 nucleotides, optionally having a 3′-terminal glyceryl moiety and wherein the two terminal 3′-nucleotides are optionally complementary to the target RNA sequence, and wherein all pyrimidine nucleotides that may be present are 2′-deoxy-2′-fluoro modified nucleotides and all purine nucleotides that may be present are 2′-O-methyl modified nucleotides except for (N N) nucleotides, which can comprise ribonucleotides, deoxynucleotides, universal bases, or other chemical modifications described herein. A modified internucleotide linkage, such as a phosphorothioate, phosphorodithioate or other modified internucleotide linkage as described herein, shown as “s”, optionally connects the (N N) nucleotides in the sense and antisense strand.

[0257] FIG. 4C: The sense strand comprises 21 nucleotides having 5′- and 3′-terminal cap moieties wherein the two terminal 3′-nucleotides are optionally base paired and wherein all pyrimidine nucleotides that may be present are 2′-O-methyl or 2′-deoxy-2′-fluoro modified nucleotides except for (N N) nucleotides, which can comprise ribonucleotides, deoxynucleotides, universal bases, or other chemical modifications described herein. The antisense strand comprises 21 nucleotides, optionally having a 3′-terminal glyceryl moiety and wherein the two terminal 3′-nucleotides are optionally complementary to the target RNA sequence, and wherein all pyrimidine nucleotides that may be present are 2′-deoxy-2′-fluoro modified nucleotides except for (N N) nucleotides, which can comprise ribonucleotides, deoxynucleotides, universal bases, or other chemical modifications described herein. A modified internucleotide linkage, such as a phosphorothioate, phosphorodithioate or other modified internucleotide linkage as described herein, shown as “s”, optionally connects the (N N) nucleotides in the antisense strand.

[0258] FIG. 4D: The sense strand comprises 21 nucleotides having 5′- and 3′-terminal cap moieties wherein the two terminal 3′-nucleotides are optionally base paired and wherein all pyrimidine nucleotides that may be present are 2′-deoxy-2′-fluoro modified nucleotides except for (N N) nucleotides, which can comprise ribonucleotides, deoxynucleotides, universal bases, or other chemical modifications described herein and wherein and all purine nucleotides that may be present are 2′-deoxy nucleotides. The antisense strand comprises 21 nucleotides, optionally having a 3′-terminal glyceryl moiety and wherein the two terminal 3′-nucleotides are optionally complementary to the target RNA sequence, wherein all pyrimidine nucleotides that may be present are 2′-deoxy-2′-fluoro modified nucleotides and all purine nucleotides that may be present are 2′-O-methyl modified nucleotides except for (N N) nucleotides, which can comprise ribonucleotides, deoxynucleotides, universal bases, or other chemical modifications described herein. A modified internucleotide linkage, such as a phosphorothioate, phosphorodithioate or other modified internucleotide linkage as described herein, shown as “s”, optionally connects the (N N) nucleotides in the antisense strand.

[0259] FIG. 4E: The sense strand comprises 21 nucleotides having 5′- and 3′-terminal cap moieties wherein the two terminal 3′-nucleotides are optionally base paired and wherein all pyrimidine nucleotides that may be present are 2′-deoxy-2′-fluoro modified nucleotides except for (N N) nucleotides, which can comprise ribonucleotides, deoxynucleotides, universal bases, or other chemical modifications described herein. The antisense strand comprises 21 nucleotides, optionally having a 3′-terminal glyceryl moiety and wherein the two terminal 3′-nucleotides are optionally complementary to the target RNA sequence, and wherein all pyrimidine nucleotides that may be present are 2′-deoxy-2′-fluoro modified nucleotides and all purine nucleotides that may be present are 2′-O-methyl modified nucleotides except for (N N) nucleotides, which can comprise ribonucleotides, deoxynucleotides, universal bases, or other chemical modifications described herein. A modified internucleotide linkage, such as a phosphorothioate, phosphorodithioate or other modified internucleotide linkage as described herein, shown as “s”, optionally connects the (N N) nucleotides in the antisense strand.

[0260] FIG. 4F: The sense strand comprises 21 nucleotides having 5′- and 3′-terminal cap moieties wherein the two terminal 3′-nucleotides are optionally base paired and wherein all pyrimidine nucleotides that may be present are 2′-deoxy-2′-fluoro modified nucleotides except for (N N) nucleotides, which can comprise ribonucleotides, deoxynucleotides, universal bases, or other chemical modifications described herein and wherein and all purine nucleotides that may be present are 2′-deoxy nucleotides. The antisense strand comprises 21 nucleotides, optionally having a 3′-terminal glyceryl moiety and wherein the two terminal 3′-nucleotides are optionally complementary to the target RNA sequence, and having one 3′-terminal phosphorothioate internucleotide linkage and wherein all pyrimidine nucleotides that may be present are 2′-deoxy-2′-fluoro modified nucleotides and all purine nucleotides that may be present are 2′-deoxy nucleotides except for (N N) nucleotides, which can comprise ribonucleotides, deoxynucleotides, universal bases, or other chemical modifications described herein. A modified internucleotide linkage, such as a phosphorothioate, phosphorodithioate or other modified internucleotide linkage as described herein, shown as “s”, optionally connects the (N N) nucleotides in the antisense strand. The antisense strand of constructs A-F comprise sequence complementary to any target nucleic acid sequence of the invention. Furthermore, when a glyceryl moiety (L) is present at the 3′-end of the antisense strand for any construct shown in FIGS. 4 A-F, the modified internucleotide linkage is optional.

[0261] FIGS. 5A-F shows non-limiting examples of specific chemically-modified siNA sequences of the invention. A-F applies the chemical modifications described in FIG. 4A-F to a MAP kinase (c-JUN) siNA sequence. Such chemical modifications can be applied to any MAP kinase sequence and/or MAP kinase polymorphism sequence.

[0262] FIG. 6 shows non-limiting examples of different siNA constructs of the invention. The examples shown (constructs 1, 2, and 3) have 19 representative base pairs; however, different embodiments of the invention include any number of base pairs described herein. Bracketed regions represent nucleotide overhangs, for example, comprising about 1, 2, 3, or 4 nucleotides in length, preferably about 2 nucleotides. Constructs 1 and 2 can be used independently for RNAi activity. Construct 2 can comprise a polynucleotide or non-nucleotide linker, which can optionally be designed as a biodegradable linker. In one embodiment, the loop structure shown in construct 2 can comprise a biodegradable linker that results in the formation of construct 1 in vivo and/or in vitro. In another example, construct 3 can be used to generate construct 2 under the same principle wherein a linker is used to generate the active siNA construct 2 in vivo and/or in vitro, which can optionally utilize another biodegradable linker to generate the active siNA construct 1 in vivo and/or in vitro. As such, the stability and/or activity of the siNA constructs can be modulated based on the design of the siNA construct for use in vivo or in vitro and/or in vitro.

[0263] FIG. 7A-C is a diagrammatic representation of a scheme utilized in generating an expression cassette to generate siNA hairpin constructs.

[0264] FIG. 7A: A DNA oligomer is synthesized with a 5′-restriction site (R1) sequence followed by a region having sequence identical (sense region of siNA) to a predetermined MAP kinase target sequence, wherein the sense region comprises, for example, about 19, 20, 21, or 22 nucleotides (N) in length, which is followed by a loop sequence of defined sequence (X), comprising, for example, about 3 to about 10 nucleotides.

[0265] FIG. 7B: The synthetic construct is then extended by DNA polymerase to generate a hairpin structure having self-complementary sequence that will result in a siNA transcript having specificity for a MAP kinase target sequence and having self-complementary sense and antisense regions.

[0266] FIG. 7C: The construct is heated (for example to about 95° C.) to linearize the sequence, thus allowing extension of a complementary second DNA strand using a primer to the 3′-restriction sequence of the first strand. The double-stranded DNA is then inserted into an appropriate vector for expression in cells. The construct can be designed such that a 3′-terminal nucleotide overhang results from the transcription, for example, by engineering restriction sites and/or utilizing a poly-U termination region as described in Paul et al., 2002, Nature Biotechnology, 29, 505-508.

[0267] FIG. 8A-C is a diagrammatic representation of a scheme utilized in generating an expression cassette to generate double-stranded siNA constructs.

[0268] FIG. 8A: A DNA oligomer is synthesized with a 5′-restriction (R1) site sequence followed by a region having sequence identical (sense region of siNA) to a predetermined MAP kinase target sequence, wherein the sense region comprises, for example, about 19, 20, 21, or 22 nucleotides (N) in length, and which is followed by a 3′-restriction site (R2) which is adjacent to a loop sequence of defined sequence (X).

[0269] FIG. 8B: The synthetic construct is then extended by DNA polymerase to generate a hairpin structure having self-complementary sequence.

[0270] FIG. 8C: The construct is processed by restriction enzymes specific to R1 and R2 to generate a double-stranded DNA which is then inserted into an appropriate vector for expression in cells. The transcription cassette is designed such that a U6 promoter region flanks each side of the dsDNA which generates the separate sense and antisense strands of the siNA. Poly T termination sequences can be added to the constructs to generate U overhangs in the resulting transcript.

[0271] FIG. 9A-E is a diagrammatic representation of a method used to determine target sites for siNA mediated RNAi within a particular target nucleic acid sequence, such as messenger RNA.

[0272] FIG. 9A: A pool of siNA oligonucleotides are synthesized wherein the antisense region of the siNA constructs has complementarity to target sites across the target nucleic acid sequence, and wherein the sense region comprises sequence complementary to the antisense region of the siNA.

[0273] FIGS. 9B&C: (FIG. 9B) The sequences are pooled and are inserted into vectors such that (FIG. 9C) transfection of a vector into cells results in the expression of the siNA.

[0274] FIG. 9D: Cells are sorted based on phenotypic change that is associated with modulation of the target nucleic acid sequence.

[0275] FIG. 9E: The siNA is isolated from the sorted cells and is sequenced to identify efficacious target sites within the target nucleic acid sequence.

[0276] FIG. 10 shows non-limiting examples of different stabilization chemistries (1-10) that can be used, for example, to stabilize the 3′-end of siNA sequences of the invention, including (1) [3-3′]-inverted deoxyribose; (2) deoxyribonucleotide; (3) [5′-3′]-3′-deoxyribonucleotide; (4) [5′-3′]-ribonucleotide; (5) [5′-3′]-3′-O-methyl ribonucleotide; (6) 3′-glyceryl; (7) [3′-5′]-3′-deoxyribonucleotide; (8) [3′-3′]-deoxyribonucleotide; (9) [5′-2′]-deoxyribonucleotide; and (10) [5-3′]-dideoxyribonucleotide. In addition to modified and unmodified backbone chemistries indicated in the figure, these chemistries can be combined with different backbone modifications as described herein, for example, backbone modifications having Formula I. In addition, the 2′-deoxy nucleotide shown 5′ to the terminal modifications shown can be another modified or unmodified nucleotide or non-nucleotide described herein, for example modifications having any of Formulae I-VII or any combination thereof.

[0277] FIG. 11 shows a non-limiting example of a strategy used to identify chemically modified siNA constructs of the invention that are nuclease resistance while preserving the ability to mediate RNAi activity. Chemical modifications are introduced into the siNA construct based on educated design parameters (e.g. introducing 2′-modifications, base modifications, backbone modifications, terminal cap modifications etc). The modified construct in tested in an appropriate system (e.g. human serum for nuclease resistance, shown, or an animal model for PK/delivery parameters). In parallel, the siNA construct is tested for RNAi activity, for example in a cell culture system such as a luciferase reporter assay). Lead siNA constructs are then identified which possess a particular characteristic while maintaining RNAi activity, and can be further modified and assayed once again. This same approach can be used to identify siNA-conjugate molecules with improved pharmacokinetic profiles, delivery, and RNAi activity.

[0278] FIG. 12 shows non-limiting examples of phosphorylated siNA molecules of the invention, including linear and duplex constructs and asymmetric derivatives thereof.

[0279] FIG. 13 shows non-limiting examples of chemically modified terminal phosphate groups of the invention.

[0280] FIG. 14A shows a non-limiting example of methodology used to design self complementary DFO constructs utilizing palindrome and/or repeat nucleic acid sequences that are identified in a target nucleic acid sequence. (i) A palindrome or repeat sequence is identified in a nucleic acid target sequence. (ii) A sequence is designed that is complementary to the target nucleic acid sequence and the palindrome sequence. (iii) An inverse repeat sequence of the non-palindrome/repeat portion of the complementary sequence is appended to the 3′-end of the complementary sequence to generate a self complementary DFO molecule comprising sequence complementary to the nucleic acid target. (iv) The DFO molecule can self-assemble to form a double stranded oligonucleotide. FIG. 14B shows a non-limiting representative example of a duplex forming oligonucleotide sequence. FIG. 14C shows a non-limiting example of the self assembly schematic of a representative duplex forming oligonucleotide sequence. FIG. 14D shows a non-limiting example of the self assembly schematic of a representative duplex forming oligonucleotide sequence followed by interaction with a target nucleic acid sequence resulting in modulation of gene expression.

[0281] FIG. 15 shows a non-limiting example of the design of self complementary DFO constructs utilizing palindrome and/or repeat nucleic acid sequences that are incorporated into the DFO constructs that have sequence complementary to any target nucleic acid sequence of interest. Incorporation of these palindrome/repeat sequences allow the design of DFO constructs that form duplexes in which each strand is capable of mediating modulation of target gene expression, for example by RNAi. First, the target sequence is identified. A complementary sequence is then generated in which nucleotide or non-nucleotide modifications (shown as X or Y) are introduced into the complementary sequence that generate an artificial palindrome (shown as XYXYXY in the Figure). An inverse repeat of the non-palindrome/repeat complementary sequence is appended to the 3′-end of the complementary sequence to generate a self complementary DFO comprising sequence complementary to the nucleic acid target. The DFO can self-assemble to form a double stranded oligonucleotide.

[0282] FIG. 16 shows non-limiting examples of multifunctional siNA molecules of the invention comprising two separate polynucleotide sequences that are each capable of mediating RNAi directed cleavage of differing target nucleic acid sequences. FIG. 16A shows a non-limiting example of a multifunctional siNA molecule having a first region that is complementary to a first target nucleic acid sequence (complementary region 1) and a second region that is complementary to a second target nucleic acid sequence (complementary region 2), wherein the first and second complementary regions are situated at the 3′-ends of each polynucleotide sequence in the multifunctional siNA. The dashed portions of each polynucleotide sequence of the multifunctional siNA construct have complementarity with regard to corresponding portions of the siNA duplex, but do not have complementarity to the target nucleic acid sequences. FIG. 16B shows a non-limiting example of a multifunctional siNA molecule having a first region that is complementary to a first target nucleic acid sequence (complementary region 1) and a second region that is complementary to a second target nucleic acid sequence (complementary region 2), wherein the first and second complementary regions are situated at the 5′-ends of each polynucleotide sequence in the multifunctional siNA. The dashed portions of each polynucleotide sequence of the multifunctional siNA construct have complementarity with regard to corresponding portions of the siNA duplex, but do not have complementarity to the target nucleic acid sequences.

[0283] FIG. 17 shows non-limiting examples of multifunctional siNA molecules of the invention comprising a single polynucleotide sequence comprising distinct regions that are each capable of mediating RNAi directed cleavage of differing target nucleic acid sequences. FIG. 17A shows a non-limiting example of a multifunctional siNA molecule having a first region that is complementary to a first target nucleic acid sequence (complementary region 1) and a second region that is complementary to a second target nucleic acid sequence (complementary region 2), wherein the second complementary region is situated at the 3′-end of the polynucleotide sequence in the multifunctional siNA. The dashed portions of each polynucleotide sequence of the multifunctional siNA construct have complementarity with regard to corresponding portions of the siNA duplex, but do not have complementarity to the target nucleic acid sequences. FIG. 17B shows a non-limiting example of a multifunctional siNA molecule having a first region that is complementary to a first target nucleic acid sequence (complementary region 1) and a second region that is complementary to a second target nucleic acid sequence (complementary region 2), wherein the first complementary region is situated at the 5′-end of the polynucleotide sequence in the multifunctional siNA. The dashed portions of each polynucleotide sequence of the multifunctional siNA construct have complementarity with regard to corresponding portions of the siNA duplex, but do not have complementarity to the target nucleic acid sequences. In one embodiment, these multifunctional siNA constructs are processed in vivo or in vitro to generate multifunctional siNA constructs as shown in FIG. 16.

[0284] FIG. 18 shows non-limiting examples of multifunctional siNA molecules of the invention comprising two separate polynucleotide sequences that are each capable of mediating RNAi directed cleavage of differing target nucleic acid sequences and wherein the multifunctional siNA construct further comprises a self complementary, palindrome, or repeat region, thus enabling shorter bifunctional siNA constructs that can mediate RNA interference against differing target nucleic acid sequences. FIG. 18A shows a non-limiting example of a multifunctional siNA molecule having a first region that is complementary to a first target nucleic acid sequence (complementary region 1) and a second region that is complementary to a second target nucleic acid sequence (complementary region 2), wherein the first and second complementary regions are situated at the 3′-ends of each polynucleotide sequence in the multifunctional siNA, and wherein the first and second complementary regions further comprise a self complementary, palindrome, or repeat region. The dashed portions of each polynucleotide sequence of the multifunctional siNA construct have complementarity with regard to corresponding portions of the siNA duplex, but do not have complementarity to the target nucleic acid sequences. FIG. 18B shows a non-limiting example of a multifunctional siNA molecule having a first region that is complementary to a first target nucleic acid sequence (complementary region 1) and a second region that is complementary to a second target nucleic acid sequence (complementary region 2), wherein the first and second complementary regions are situated at the 5′-ends of each polynucleotide sequence in the multifunctional siNA, and wherein the first and second complementary regions further comprise a self complementary, palindrome, or repeat region. The dashed portions of each polynucleotide sequence of the multifunctional siNA construct have complementarity with regard to corresponding portions of the siNA duplex, but do not have complementarity to the target nucleic acid sequences.

[0285] FIG. 19 shows non-limiting examples of multifunctional siNA molecules of the invention comprising a single polynucleotide sequence comprising distinct regions that are each capable of mediating RNAi directed cleavage of differing target nucleic acid sequences and wherein the multifunctional siNA construct further comprises a self complementary, palindrome, or repeat region, thus enabling shorter bifunctional siNA constructs that can mediate RNA interference against differing target nucleic acid sequences. FIG. 19A shows a non-limiting example of a multifunctional siNA molecule having a first region that is complementary to a first target nucleic acid sequence (complementary region 1) and a second region that is complementary to a second target nucleic acid sequence (complementary region 2), wherein the second complementary region is situated at the 3′-end of the polynucleotide sequence in the multifunctional siNA, and wherein the first and second complementary regions further comprise a self complementary, palindrome, or repeat region. The dashed portions of each polynucleotide sequence of the multifunctional siNA construct have complementarity with regard to corresponding portions of the siNA duplex, but do not have complementarity to the target nucleic acid sequences. FIG. 19B shows a non-limiting example of a multifunctional siNA molecule having a first region that is complementary to a first target nucleic acid sequence (complementary region 1) and a second region that is complementary to a second target nucleic acid sequence (complementary region 2), wherein the first complementary region is situated at the 5′-end of the polynucleotide sequence in the multifunctional siNA, and wherein the first and second complementary regions further comprise a self complementary, palindrome, or repeat region. The dashed portions of each polynucleotide sequence of the multifunctional siNA construct have complementarity with regard to corresponding portions of the siNA duplex, but do not have complementarity to the target nucleic acid sequences. In one embodiment, these multifunctional siNA constructs are processed in vivo or in vitro to generate multifunctional siNA constructs as shown in FIG. 18.

[0286] FIG. 20 shows a non-limiting example of how multifunctional siNA molecules of the invention can target two separate target nucleic acid molecules, such as separate RNA molecules encoding differing proteins, for example, a cytokine and its corresponding receptor, differing viral strains, a virus and a cellular protein involved in viral infection or replication, or differing proteins involved in a common or divergent biologic pathway that is implicated in the maintenance of progression of disease. Each strand of the multifunctional siNA construct comprises a region having complementarity to separate target nucleic acid molecules. The multifunctional siNA molecule is designed such that each strand of the siNA can be utilized by the RISC to initiate RNA interference mediated cleavage of its corresponding target. These design parameters can include destabilization of each end of the siNA construct (see for example Schwarz et al., 2003, Cell, 115, 199-208). Such destabilization can be accomplished for example by using guanosine-cytidine base pairs, alternate base pairs (e.g., wobbles), or destabilizing chemically modified nucleotides at terminal nucleotide positions as is known in the art.

[0287] FIG. 21 shows a non-limiting example of how multifunctional siNA molecules of the invention can target two separate target nucleic acid sequences within the same target nucleic acid molecule, such as alternate coding regions of a RNA, coding and non-coding regions of a RNA, or alternate splice variant regions of a RNA. Each strand of the multifunctional siNA construct comprises a region having complementarity to the separate regions of the target nucleic acid molecule. The multifunctional siNA molecule is designed such that each strand of the siNA can be utilized by the RISC to initiate RNA interference mediated cleavage of its corresponding target region. These design parameters can include destabilization of each end of the siNA construct (see for example Schwarz et al., 2003, Cell, 115, 199-208). Such destabilization can be accomplished for example by using guanosine-cytidine base pairs, alternate base pairs (e.g., wobbles), or destabilizing chemically modified nucleotides at terminal nucleotide positions as is known in the art.

[0288] FIG. 22 shows a non-limiting example of parallel MAPK cascades that involve specific MAPK enzyme modules. Each of the MAPK/ERK, JNK and p38 cascades consists of a three-enzyme module that includes MEKK, MEK and an ERK or MAPK superfamily member. A variety of extracellular signals triggers initial events upon association with their respective cell surface receptors and this signal is then transmitted to the interior of the cell where it activates the appropriate cascades. The shaded area indicates those signaling molecules that become associated with the intracellular surface of the plasma membrane upon activation (figure adapted from Cobb and Schaefer, 1996, Promega Notes Magazine Number 59, page 37).

[0289] FIG. 23 shows a non-limiting example of reduction of p38 (MAPK 14) mRNA in A549 cells mediated by chemically modified siNAs that target p38 mRNA. A549 cells were transfected with 0.25 ug/well of lipid complexed with 25 nM siNA. Active siNA constructs (solid bars) comprising various stabilization chemistries (see Tables III and IV) were compared to untreated cells, matched chemistry irrelevant siNA control constructs (IC-1, IC-2), and cells transfected with lipid alone (transfection control). As shown in the figure, the siNA constructs significantly reduce p38 RNA expression.

[0290] FIG. 24 shows a non-limiting example of reduction of JNK1 mRNA in A549 cells mediated by chemically modified siNAs that target p38 mRNA. A549 cells were transfected with 0.25 ug/well of lipid complexed with 25 nM siNA. Active siNA constructs (solid bars) comprising various stabilization chemistries (see Tables III and IV) were compared to untreated cells, matched chemistry irrelevant siNA control constructs (IC-1, IC-2), and cells transfected with lipid alone (transfection control). As shown in the figure, the siNA constructs significantly reduce JNK1 RNA expression.

[0291] FIG. 25 shows a non-limiting example of reduction of c-JUN gene expression in HEPA1C1C7 cells using siNA constructs targeting c-JUN RNA. A549 cells were transfected with 0.25 ug/well of lipid complexed with 100 nM siNA. Active siNA constructs (solid bars) were compared to untreated cells, matched chemistry inverted control siNA constructs, and cells transfected with lipid alone (transfection control). As shown in FIG. 25, the active siNA constructs show significant reduction of c-JUN RNA expression compared to matched chemistry inverted controls, untreated cells, and transfection controls.

[0292] FIG. 26 shows a non-limiting example of reduction of ERK1 (MAPK 3) mRNA in A549 cells mediated by chemically modified siNAs that target ERK1 mRNA. A549 cells were transfected with 0.25 ug/well of lipid complexed with 25 nM siNA. Active siNA constructs (solid bars) comprising various stabilization chemistries (see Tables III and IV) were compared to untreated cells, matched chemistry irrelevant siNA control constructs (IC1, IC2), and cells transfected with lipid alone (transfection control). As shown in the figure, the siNA constructs significantly reduce ERK1 RNA expression.

### DETAILED DESCRIPTION OF THE INVENTION

### Mechanism of Action of Nucleic Acid Molecules of the Invention

[0293] The discussion that follows discusses the proposed mechanism of RNA interference mediated by short interfering RNA as is presently known, and is not meant to be limiting and is not an admission of prior art. Applicant demonstrates herein that chemically-modified short interfering nucleic acids possess similar or improved capacity to mediate RNAi as do siRNA molecules and are expected to possess improved stability and activity in vivo; therefore, this discussion is not meant to be limiting only to siRNA and can be applied to siNA as a whole. By “improved capacity to mediate RNAi” or “improved RNAi activity” is meant to include RNAi activity measured in vitro and/or in vivo where the RNAi activity is a reflection of both the ability of the siNA to mediate RNAi and the stability of the siNAs of the invention. In this invention, the product of these activities can be increased in vitro and/or in vivo compared to an all RNA siRNA or a siNA containing a plurality of ribonucleotides. In some cases, the activity or stability of the siNA molecule can be decreased (i.e., less than ten-fold), but the overall activity of the siNA molecule is enhanced in vitro and/or in vivo.

[0294] RNA interference refers to the process of sequence specific post-transcriptional gene silencing in animals mediated by short interfering RNAs (siRNAs) (Fire et al., 1998, Nature, 391, 806). The corresponding process in plants is commonly referred to as post-transcriptional gene silencing or RNA silencing and is also referred to as quelling in fungi. The process of post-transcriptional gene silencing is thought to be an evolutionarily-conserved cellular defense mechanism used to prevent the expression of foreign genes which is commonly shared by diverse flora and phyla (Fire et al., 1999, Trends Genet., 15, 358). Such protection from foreign gene expression may have evolved in response to the production of double-stranded RNAs (dsRNAs) derived from viral infection or the random integration of transposon elements into a host genome via a cellular response that specifically destroys homologous single-stranded RNA or viral genomic RNA. The presence of dsRNA in cells triggers the RNAi response though a mechanism that has yet to be fully characterized. This mechanism appears to be different from the interferon response that results from dsRNA-mediated activation of protein kinase PKR and 2′,5′-oligoadenylate synthetase resulting in non-specific cleavage of mRNA by ribonuclease L.

[0295] The presence of long dsRNAs in cells stimulates the activity of a ribonuclease III enzyme referred to as Dicer. Dicer is involved in the processing of the dsRNA into short pieces of dsRNA known as short interfering RNAs (siRNAs) (Berstein et al., 2001, Nature, 409, 363). Short interfering RNAs derived from Dicer activity are typically about 21 to about 23 nucleotides in length and comprise about 19 base pair duplexes. Dicer has also been implicated in the excision of 21- and 22-nucleotide small temporal RNAs (stRNAs) from precursor RNA of conserved structure that are implicated in translational control (Hutvagner et al., 2001, Science, 293, 834). The RNAi response also features an endonuclease complex containing a siRNA, commonly referred to as an RNA-induced silencing complex (RISC), which mediates cleavage of single-stranded RNA having sequence homologous to the siRNA. Cleavage of the target RNA takes place in the middle of the region complementary to the guide sequence of the siRNA duplex (Elbashir et al., 2001, Genes Dev., 15, 188). In addition, RNA interference can also involve small RNA (e.g., micro-RNA or miRNA) mediated gene silencing, presumably though cellular mechanisms that regulate chromatin structure and thereby prevent transcription of target gene sequences (see for example Allshire, 2002, Science, 297, 1818-1819; Volpe et al., 2002, Science, 297, 1833-1837; Jenuwein, 2002, Science, 297, 2215-2218; and Hall et al., 2002, Science, 297, 2232-2237). As such, siNA molecules of the invention can be used to mediate gene silencing via interaction with RNA transcripts or alternately by interaction with particular gene sequences, wherein such interaction results in gene silencing either at the transcriptional level or post-transcriptional level.

[0296] RNAi has been studied in a variety of systems. Fire et al., 1998, Nature, 391, 806, were the first to observe RNAi in C. elegans. Wianny and Goetz, 1999, Nature Cell Biol., 2, 70, describe RNAi mediated by dsRNA in mouse embryos. Hammond et al., 2000, Nature, 404, 293, describe RNAi in Drosophila cells transfected with dsRNA. Elbashir et al., 2001, Nature, 411, 494, describe RNAi induced by introduction of duplexes of synthetic 21-nucleotide RNAs in cultured mammalian cells including human embryonic kidney and HeLa cells. Recent work in Drosophila embryonic lysates has revealed certain requirements for siRNA length, structure, chemical composition, and sequence that are essential to mediate efficient RNAi activity. These studies have shown that 21 nucleotide siRNA duplexes are most active when containing two 2-nucleotide 3′-terminal nucleotide overhangs. Furthermore, substitution of one or both siRNA strands with 2′-deoxy or 2′-O-methyl nucleotides abolishes RNAi activity, whereas substitution of 3′-terminal siRNA nucleotides with deoxy nucleotides was shown to be tolerated. Mismatch sequences in the center of the siRNA duplex were also shown to abolish RNAi activity. In addition, these studies also indicate that the position of the cleavage site in the target RNA is defined by the 5′-end of the siRNA guide sequence rather than the 3′-end (Elbashir et al., 2001, EMBO J., 20, 6877). Other studies have indicated that a 5′-phosphate on the target-complementary strand of a siRNA duplex is required for siRNA activity and that ATP is utilized to maintain the 5′-phosphate moiety on the siRNA (Nykanen et al., 2001, Cell, 107, 309); however, siRNA molecules lacking a 5′-phosphate are active when introduced exogenously, suggesting that 5′-phosphorylation of siRNA constructs may occur in vivo.

### Synthesis of Nucleic Acid Molecules

[0297] Synthesis of nucleic acids greater than 100 nucleotides in length is difficult using automated methods, and the therapeutic cost of such molecules is prohibitive. In this invention, small nucleic acid motifs (“small” refers to nucleic acid motifs no more than 100 nucleotides in length, preferably no more than 80 nucleotides in length, and most preferably no more than 50 nucleotides in length; e.g., individual siNA oligonucleotide sequences or siNA sequences synthesized in tandem) are preferably used for exogenous delivery. The simple structure of these molecules increases the ability of the nucleic acid to invade targeted regions of protein and/or RNA structure. Exemplary molecules of the instant invention are chemically synthesized, and others can similarly be synthesized.

[0298] Oligonucleotides (e.g., certain modified oligonucleotides or portions of oligonucleotides lacking ribonucleotides) are synthesized using protocols known in the art, for example as described in Caruthers et al., 1992, Methods in Enzymology 211, 3-19, Thompson et al., International PCT Publication No. WO 99/54459, Wincott et al., 1995, Nucleic Acids Res. 23, 2677-2684, Wincott et al., 1997, Methods Mol. Bio., 74, 59, Brennan et al., 1998, Biotechnol Bioeng., 61, 33-45, and Brennan, U.S. Pat. No. 6,001,311. All of these references are incorporated herein by reference. The synthesis of oligonucleotides makes use of common nucleic acid protecting and coupling groups, such as dimethoxytrityl at the 5′-end, and phosphoramidites at the 3′-end. In a non-limiting example, small scale syntheses are conducted on a 394 Applied Biosystems, Inc. synthesizer using a 0.2 μmol scale protocol with a 2.5 min coupling step for 2′-O-methylated nucleotides and a 45 second coupling step for 2′-deoxy nucleotides or 2′-deoxy-2′-fluoro nucleotides. Table V outlines the amounts and the contact times of the reagents used in the synthesis cycle. Alternatively, syntheses at the 0.2 μmol scale can be performed on a 96-well plate synthesizer, such as the instrument produced by Protogene (Palo Alto, Calif.) with minimal modification to the cycle. A 33-fold excess (60 μL of 0.11 M=6.6 μmol) of 2′-O-methyl phosphoramidite and a 105-fold excess of S-ethyl tetrazole (60 μL of 0.25 M=15 μmol) can be used in each coupling cycle of 2′-O-methyl residues relative to polymer-bound 5′-hydroxyl. A 22-fold excess (40 μL of 0.11 M=4.4 μmol) of deoxy phosphoramidite and a 70-fold excess of S-ethyl tetrazole (40 μL of 0.25 M=10 μmol) can be used in each coupling cycle of deoxy residues relative to polymer-bound 5′-hydroxyl. Average coupling yields on the 394 Applied Biosystems, Inc. synthesizer, determined by colorimetric quantitation of the trityl fractions, are typically 97.5-99%. Other oligonucleotide synthesis reagents for the 394 Applied Biosystems, Inc. synthesizer include the following: detritylation solution is 3% TCA in methylene chloride (ABI); capping is performed with 16% N-methyl imidazole in THF (ABI) and 10% acetic anhydride/10% 2,6-lutidine in THF (ABI); and oxidation solution is 16.9 mM 12, 49 mM pyridine, 9% water in THF (PerSeptive Biosystems, Inc.). Burdick & Jackson Synthesis Grade acetonitrile is used directly from the reagent bottle. S-Ethyltetrazole solution (0.25 M in acetonitrile) is made up from the solid obtained from American International Chemical, Inc. Alternately, for the introduction of phosphorothioate linkages, Beaucage reagent (3H-1,2-Benzodithiol-3-one 1,1-dioxide, 0.05 M in acetonitrile) is used.

[0299] Deprotection of the DNA-based oligonucleotides is performed as follows: the polymer-bound trityl-on oligoribonucleotide is transferred to a 4 mL glass screw top vial and suspended in a solution of 40% aqueous methylamine (1 mL) at 65° C. for 10 minutes. After cooling to −20° C., the supernatant is removed from the polymer support. The support is washed three times with 1.0 mL of EtOH:MeCN:H2O/3:1:1, vortexed and the supernatant is then added to the first supernatant. The combined supernatants, containing the oligoribonucleotide, are dried to a white powder.

[0300] The method of synthesis used for RNA including certain siNA molecules of the invention follows the procedure as described in Usman et al., 1987, J. Am. Chem. Soc., 109, 7845; Scaringe et al., 1990, Nucleic Acids Res., 18, 5433; and Wincott et al., 1995, Nucleic Acids Res. 23, 2677-2684 Wincott et al., 1997, Methods Mol. Bio., 74, 59, and makes use of common nucleic acid protecting and coupling groups, such as dimethoxytrityl at the 5′-end, and phosphoramidites at the 3′-end. In a non-limiting example, small scale syntheses are conducted on a 394 Applied Biosystems, Inc. synthesizer using a 0.2 μmol scale protocol with a 7.5 min coupling step for alkylsilyl protected nucleotides and a 2.5 min coupling step for 2′-O-methylated nucleotides. Table V outlines the amounts and the contact times of the reagents used in the synthesis cycle. Alternatively, syntheses at the 0.2 μmol scale can be done on a 96-well plate synthesizer, such as the instrument produced by Protogene (Palo Alto, Calif.) with minimal modification to the cycle. A 33-fold excess (60 μL of 0.11 M=6.6 μmol) of 2′-O-methyl phosphoramidite and a 75-fold excess of S-ethyl tetrazole (60 μL of 0.25 M=15 μmol) can be used in each coupling cycle of 2′-O-methyl residues relative to polymer-bound 5′-hydroxyl. A 66-fold excess (120 μL of 0.11 M=13.2 μmol) of alkylsilyl (ribo) protected phosphoramidite and a 150-fold excess of S-ethyl tetrazole (120 μL of 0.25 M=30 μmol) can be used in each coupling cycle of ribo residues relative to polymer-bound 5′-hydroxyl. Average coupling yields on the 394 Applied Biosystems, Inc. synthesizer, determined by colorimetric quantitation of the trityl fractions, are typically 97.5-99%. Other oligonucleotide synthesis reagents for the 394 Applied Biosystems, Inc. synthesizer include the following: detritylation solution is 3% TCA in methylene chloride (ABI); capping is performed with 16% N-methyl imidazole in THF (ABI) and 10% acetic anhydride/10% 2,6-lutidine in THF (ABI); oxidation solution is 16.9 mM I₂, 49 mM pyridine, 9% water in THF (PerSeptive Biosystems, Inc.). Burdick & Jackson Synthesis Grade acetonitrile is used directly from the reagent bottle. S-Ethyltetrazole solution (0.25 M in acetonitrile) is made up from the solid obtained from American International Chemical, Inc. Alternately, for the introduction of phosphorothioate linkages, Beaucage reagent (3H-1,2-Benzodithiol-3-one 1,1-dioxide.05 M in acetonitrile) is used.

[0301] Deprotection of the RNA is performed using either a two-pot or one-pot protocol. For the two-pot protocol, the polymer-bound trityl-on oligoribonucleotide is transferred to a 4 mL glass screw top vial and suspended in a solution of 40% aq. methylamine (1 mL) at 65° C. for 10 min. After cooling to −20° C., the supernatant is removed from the polymer support. The support is washed three times with 1.0 mL of EtOH:MeCN:H2O/3:1:1, vortexed and the supernatant is then added to the first supernatant. The combined supernatants, containing the oligoribonucleotide, are dried to a white powder. The base deprotected oligoribonucleotide is resuspended in anhydrous TEA/HF/NMP solution (300 μL of a solution of 1.5 mL N-methylpyrrolidinone, 750 μL TEA and 1 mL TEA•3HF to provide a 1.4 M HF concentration) and heated to 65° C. After 1.5 h, the oligomer is quenched with 1.5 M NH₄HCO₃.

[0302] Alternatively, for the one-pot protocol, the polymer-bound trityl-on oligoribonucleotide is transferred to a 4 mL glass screw top vial and suspended in a solution of 33% ethanolic methylamine/DMSO: 1/1 (0.8 mL) at 65° C. for 15 minutes. The vial is brought to room temperature TEA•3HF (0.1 mL) is added and the vial is heated at 65° C. for 15 minutes. The sample is cooled at −20° C. and then quenched with 1.5 M NH₄HCO₃.

[0303] For purification of the trityl-on oligomers, the quenched NH₄HCO₃ solution is loaded onto a C-18 containing cartridge that had been prewashed with acetonitrile followed by 50 mM TEAA. After washing the loaded cartridge with water, the RNA is detritylated with 0.5% TFA for 13 minutes. The cartridge is then washed again with water, salt exchanged with 1 M NaCl and washed with water again. The oligonucleotide is then eluted with 30% acetonitrile.

[0304] The average stepwise coupling yields are typically >98% (Wincott et al., 1995 Nucleic Acids Res. 23, 2677-2684). Those of ordinary skill in the art will recognize that the scale of synthesis can be adapted to be larger or smaller than the example described above including but not limited to 96-well format.

[0305] Alternatively, the nucleic acid molecules of the present invention can be synthesized separately and joined together post-synthetically, for example, by ligation (Moore et al., 1992, Science 256, 9923; Draper et al., International PCT publication No. WO 93/23569; Shabarova et al., 1991, Nucleic Acids Research 19, 4247; Bellon et al., 1997, Nucleosides & Nucleotides, 16, 951; Bellon et al., 1997, Bioconjugate Chem. 8, 204), or by hybridization following synthesis and/or deprotection.

[0306] The siNA molecules of the invention can also be synthesized via a tandem synthesis methodology as described in Example 1 herein, wherein both siNA strands are synthesized as a single contiguous oligonucleotide fragment or strand separated by a cleavable linker which is subsequently cleaved to provide separate siNA fragments or strands that hybridize and permit purification of the siNA duplex. The linker can be a polynucleotide linker or a non-nucleotide linker. The tandem synthesis of siNA as described herein can be readily adapted to both multiwell/multiplate synthesis platforms such as 96 well or similarly larger multi-well platforms. The tandem synthesis of siNA as described herein can also be readily adapted to large scale synthesis platforms employing batch reactors, synthesis columns and the like.

[0307] A siNA molecule can also be assembled from two distinct nucleic acid strands or fragments wherein one fragment includes the sense region and the second fragment includes the antisense region of the RNA molecule.

[0308] The nucleic acid molecules of the present invention can be modified extensively to enhance stability by modification with nuclease resistant groups, for example, 2′-amino, 2′-C-allyl, 2′-fluoro, 2′-O-methyl, 2′-H (for a review see Usman and Cedergren, 1992, TIBS 17, 34; Usman et al., 1994, Nucleic Acids Symp. Ser. 31, 163). siNA constructs can be purified by gel electrophoresis using general methods or can be purified by high pressure liquid chromatography (HPLC; see Wincott et al., supra, the totality of which is hereby incorporated herein by reference) and re-suspended in water.

[0309] In another aspect of the invention, siNA molecules of the invention are expressed from transcription units inserted into DNA or RNA vectors. The recombinant vectors can be DNA plasmids or viral vectors. siNA expressing viral vectors can be constructed based on, but not limited to, adeno-associated virus, retrovirus, adenovirus, or alphavirus. The recombinant vectors capable of expressing the siNA molecules can be delivered as described herein, and persist in target cells. Alternatively, viral vectors can be used that provide for transient expression of siNA molecules.

### Optimizing Activity of the Nucleic Acid Molecule of the Invention

[0310] Chemically synthesizing nucleic acid molecules with modifications (base, sugar and/or phosphate) can prevent their degradation by serum ribonucleases, which can increase their potency (see e.g., Eckstein et al., International Publication No. WO 92/07065; Perrault et al., 1990 Nature 344, 565; Pieken et al., 1991, Science 253, 314; Usman and Cedergren, 1992, Trends in Biochem. Sci. 17, 334; Usman et al., International Publication No. WO 93/15187; and Rossi et al., International Publication No. WO 91/03162; Sproat, U.S. Pat. No. 5,334,711; Gold et al., U.S. Pat. No. 6,300,074; and Burgin et al., supra; all of which are incorporated by reference herein). All of the above references describe various chemical modifications that can be made to the base, phosphate and/or sugar moieties of the nucleic acid molecules described herein. Modifications that enhance their efficacy in cells, and removal of bases from nucleic acid molecules to shorten oligonucleotide synthesis times and reduce chemical requirements are desired.

[0311] There are several examples in the art describing sugar, base and phosphate modifications that can be introduced into nucleic acid molecules with significant enhancement in their nuclease stability and efficacy. For example, oligonucleotides are modified to enhance stability and/or enhance biological activity by modification with nuclease resistant groups, for example, 2′-amino, 2′-C-allyl, 2′-fluoro, 2′-O-methyl, 2′-O-allyl, 2′-H, nucleotide base modifications (for a review see Usman and Cedergren, 1992, TIBS. 17, 34; Usman et al., 1994, Nucleic Acids Symp. Ser. 31, 163; Burgin et al., 1996, Biochemistry, 35, 14090). Sugar modification of nucleic acid molecules have been extensively described in the art (see Eckstein et al., International Publication PCT No. WO 92/07065; Perrault et al. Nature, 1990, 344, 565-568; Pieken et al. Science, 1991, 253, 314-317; Usman and Cedergren, Trends in Biochem. Sci., 1992, 17, 334-339; Usman et al. International Publication PCT No. WO 93/15187; Sproat, U.S. Pat. No. 5,334,711 and Beigelman et al., 1995, J. Biol. Chem., 270, 25702; Beigelman et al., International PCT publication No. WO 97/26270; Beigelman et al., U.S. Pat. No. 5,716,824; Usman et al., U.S. Pat. No. 5,627,053; Woolf et al., International PCT Publication No. WO 98/13526; Thompson et al., U.S. Ser. No. 60/082,404 which was filed on Apr. 20, 1998; Karpeisky et al., 1998, Tetrahedron Lett., 39, 1131; Earnshaw and Gait, 1998, Biopolymers (Nucleic Acid Sciences), 48, 39-55; Verma and Eckstein, 1998, Annu. Rev. Biochem., 67, 99-134; and Burlina et al., 1997, Bioorg. Med. Chem., 5, 1999-2010; all of the references are hereby incorporated in their totality by reference herein). Such publications describe general methods and strategies to determine the location of incorporation of sugar, base and/or phosphate modifications and the like into nucleic acid molecules without modulating catalysis, and are incorporated by reference herein. In view of such teachings, similar modifications can be used as described herein to modify the siNA nucleic acid molecules of the instant invention so long as the ability of siNA to promote RNAi is cells is not significantly inhibited.

[0312] While chemical modification of oligonucleotide internucleotide linkages with phosphorothioate, phosphorodithioate, and/or 5′-methylphosphonate linkages improves stability, excessive modifications can cause some toxicity or decreased activity. Therefore, when designing nucleic acid molecules, the amount of these internucleotide linkages should be minimized. The reduction in the concentration of these linkages should lower toxicity, resulting in increased efficacy and higher specificity of these molecules.

[0313] Short interfering nucleic acid (siNA) molecules having chemical modifications that maintain or enhance activity are provided. Such a nucleic acid is also generally more resistant to nucleases than an unmodified nucleic acid. Accordingly, the in vitro and/or in vivo activity should not be significantly lowered. In cases in which modulation is the goal, therapeutic nucleic acid molecules delivered exogenously should optimally be stable within cells until translation of the target RNA has been modulated long enough to reduce the levels of the undesirable protein. This period of time varies between hours to days depending upon the disease state. Improvements in the chemical synthesis of RNA and DNA (Wincott et al., 1995, Nucleic Acids Res. 23, 2677; Caruthers et al., 1992, Methods in Enzymology 211, 3-19 (incorporated by reference herein)) have expanded the ability to modify nucleic acid molecules by introducing nucleotide modifications to enhance their nuclease stability, as described above.

[0314] In one embodiment, nucleic acid molecules of the invention include one or more (e.g., about 1, 2, 3, 4, 5, 6, 7, 8, 9, 10, or more) G-clamp nucleotides. A G-clamp nucleotide is a modified cytosine analog wherein the modifications confer the ability to hydrogen bond both Watson-Crick and Hoogsteen faces of a complementary guanine within a duplex, see for example Lin and Matteucci, 1998, J. Am. Chem. Soc., 120, 8531-8532. A single G-clamp analog substitution within an oligonucleotide can result in substantially enhanced helical thermal stability and mismatch discrimination when hybridized to complementary oligonucleotides. The inclusion of such nucleotides in nucleic acid molecules of the invention results in both enhanced affinity and specificity to nucleic acid targets, complementary sequences, or template strands. In another embodiment, nucleic acid molecules of the invention include one or more (e.g., about 1, 2, 3, 4, 5, 6, 7, 8, 9, 10, or more) LNA “locked nucleic acid” nucleotides such as a 2′,4′-C methylene bicyclo nucleotide (see for example Wengel et al., International PCT Publication No. WO 00/66604 and WO 99/14226).

[0315] In another embodiment, the invention features conjugates and/or complexes of siNA molecules of the invention. Such conjugates and/or complexes can be used to facilitate delivery of siNA molecules into a biological system, such as a cell. The conjugates and complexes provided by the instant invention can impart therapeutic activity by transferring therapeutic compounds across cellular membranes, altering the pharmacokinetics, and/or modulating the localization of nucleic acid molecules of the invention. The present invention encompasses the design and synthesis of novel conjugates and complexes for the delivery of molecules, including, but not limited to, small molecules, lipids, cholesterol, phospholipids, nucleosides, nucleotides, nucleic acids, antibodies, toxins, negatively charged polymers and other polymers, for example proteins, peptides, hormones, carbohydrates, polyethylene glycols, or polyamines, across cellular membranes. In general, the transporters described are designed to be used either individually or as part of a multi-component system, with or without degradable linkers. These compounds are expected to improve delivery and/or localization of nucleic acid molecules of the invention into a number of cell types originating from different tissues, in the presence or absence of serum (see Sullenger and Cech, U.S. Pat. No. 5,854,038). Conjugates of the molecules described herein can be attached to biologically active molecules via linkers that are biodegradable, such as biodegradable nucleic acid linker molecules.

[0316] The term “biodegradable linker” as used herein, refers to a nucleic acid or non-nucleic acid linker molecule that is designed as a biodegradable linker to connect one molecule to another molecule, for example, a biologically active molecule to a siNA molecule of the invention or the sense and antisense strands of a siNA molecule of the invention. The biodegradable linker is designed such that its stability can be modulated for a particular purpose, such as delivery to a particular tissue or cell type. The stability of a nucleic acid-based biodegradable linker molecule can be modulated by using various chemistries, for example combinations of ribonucleotides, deoxyribonucleotides, and chemically-modified nucleotides, such as 2′-O-methyl, 2′-fluoro, 2′-amino, 2′-O-amino, 2′-C-allyl, 2′-O-allyl, and other 2′-modified or base modified nucleotides. The biodegradable nucleic acid linker molecule can be a dimer, trimer, tetramer or longer nucleic acid molecule, for example, an oligonucleotide of about 2, 3, 4, 5, 6, 7, 8, 9, 10, 11, 12, 13, 14, 15, 16, 17, 18, 19, or 20 nucleotides in length, or can comprise a single nucleotide with a phosphorus-based linkage, for example, a phosphoramidate or phosphodiester linkage. The biodegradable nucleic acid linker molecule can also comprise nucleic acid backbone, nucleic acid sugar, or nucleic acid base modifications.

[0317] The term “biodegradable” as used herein, refers to degradation in a biological system, for example, enzymatic degradation or chemical degradation.

[0318] The term “biologically active molecule” as used herein refers to compounds or molecules that are capable of eliciting or modifying a biological response in a system. Non-limiting examples of biologically active siNA molecules either alone or in combination with other molecules contemplated by the instant invention include therapeutically active molecules such as antibodies, cholesterol, hormones, antivirals, peptides, proteins, chemotherapeutics, small molecules, vitamins, co-factors, nucleosides, nucleotides, oligonucleotides, enzymatic nucleic acids, antisense nucleic acids, triplex forming oligonucleotides, 2,5-A chimeras, siNA, dsRNA, allozymes, aptamers, decoys and analogs thereof. Biologically active molecules of the invention also include molecules capable of modulating the pharmacokinetics and/or pharmacodynamics of other biologically active molecules, for example, lipids and polymers such as polyamines, polyamides, polyethylene glycol and other polyethers.

[0319] The term “phospholipid” as used herein, refers to a hydrophobic molecule comprising at least one phosphorus group. For example, a phospholipid can comprise a phosphorus-containing group and saturated or unsaturated alkyl group, optionally substituted with OH, COOH, oxo, amine, or substituted or unsubstituted aryl groups.

[0320] Therapeutic nucleic acid molecules (e.g., siNA molecules) delivered exogenously optimally are stable within cells until reverse transcription of the RNA has been modulated long enough to reduce the levels of the RNA transcript. The nucleic acid molecules are resistant to nucleases in order to function as effective intracellular therapeutic agents. Improvements in the chemical synthesis of nucleic acid molecules described in the instant invention and in the art have expanded the ability to modify nucleic acid molecules by introducing nucleotide modifications to enhance their nuclease stability as described above.

[0321] In yet another embodiment, siNA molecules having chemical modifications that maintain or enhance enzymatic activity of proteins involved in RNAi are provided. Such nucleic acids are also generally more resistant to nucleases than unmodified nucleic acids. Thus, in vitro and/or in vivo the activity should not be significantly lowered.

[0322] Use of the nucleic acid-based molecules of the invention will lead to better treatments by affording the possibility of combination therapies (e.g., multiple siNA molecules targeted to different genes; nucleic acid molecules coupled with known small molecule modulators; or intermittent treatment with combinations of molecules, including different motifs and/or other chemical or biological molecules). The treatment of subjects with siNA molecules can also include combinations of different types of nucleic acid molecules, such as enzymatic nucleic acid molecules (ribozymes), allozymes, antisense, 2,5-A oligoadenylate, decoys, and aptamers.

[0323] In another aspect a siNA molecule of the invention comprises one or more 5′ and/or a 3′-cap structure, for example, on only the sense siNA strand, the antisense siNA strand, or both siNA strands.

[0324] By “cap structure” is meant chemical modifications, which have been incorporated at either terminus of the oligonucleotide (see, for example, Adamic et al., U.S. Pat. No. 5,998,203, incorporated by reference herein). These terminal modifications protect the nucleic acid molecule from exonuclease degradation, and may help in delivery and/or localization within a cell. The cap may be present at the 5′-terminus (5′-cap) or at the 3′-terminal (3′-cap) or may be present on both termini. In non-limiting examples, the 5′-cap includes, but is not limited to, glyceryl, inverted deoxy abasic residue (moiety); 4′,5′-methylene nucleotide; 1-(beta-D-erythrofuranosyl) nucleotide, 4′-thio nucleotide; carbocyclic nucleotide; 1,5-anhydrohexitol nucleotide; L-nucleotides; alpha-nucleotides; modified base nucleotide; phosphorodithioate linkage; threo-pentofuranosyl nucleotide; acyclic 3′,4′-seco nucleotide; acyclic 3,4-dihydroxybutyl nucleotide; acyclic 3,5-dihydroxypentyl nucleotide, 3′-3′-inverted nucleotide moiety; 3′-3′-inverted abasic moiety; 3′-2′-inverted nucleotide moiety; 3′-2′-inverted abasic moiety; 1,4-butanediol phosphate; 3′-phosphoramidate; hexylphosphate; aminohexyl phosphate; 3′-phosphate; 3′-phosphorothioate; phosphorodithioate; or bridging or non-bridging methylphosphonate moiety. Non-limiting examples of cap moieties are shown in FIG. 10.

[0325] Non-limiting examples of the 3′-cap include, but are not limited to, glyceryl, inverted deoxy abasic residue (moiety), 4′,5′-methylene nucleotide; 1-(beta-D-erythrofuranosyl) nucleotide; 4′-thio nucleotide, carbocyclic nucleotide; 5′-amino-alkyl phosphate; 1,3-diamino-2-propyl phosphate; 3-aminopropyl phosphate; 6-aminohexyl phosphate; 1,2-aminododecyl phosphate; hydroxypropyl phosphate; 1,5-anhydrohexitol nucleotide; L-nucleotide; alpha-nucleotide; modified base nucleotide; phosphorodithioate; threo-pentofuranosyl nucleotide; acyclic 3′,4′-seco nucleotide; 3,4-dihydroxybutyl nucleotide; 3,5-dihydroxypentyl nucleotide, 5′-5′-inverted nucleotide moiety; 5′-5′-inverted abasic moiety; 5′-phosphoramidate; 5′-phosphorothioate; 1,4-butanediol phosphate; 5′-amino; bridging and/or non-bridging 5′-phosphoramidate, phosphorothioate and/or phosphorodithioate, bridging or non bridging methylphosphonate and 5′-mercapto moieties (for more details see Beaucage and Iyer, 1993, Tetrahedron 49, 1925; incorporated by reference herein).

[0326] By the term “non-nucleotide” is meant any group or compound which can be incorporated into a nucleic acid chain in the place of one or more nucleotide units, including either sugar and/or phosphate substitutions, and allows the remaining bases to exhibit their enzymatic activity. The group or compound is abasic in that it does not contain a commonly recognized nucleotide base, such as adenosine, guanine, cytosine, uracil or thymine and therefore lacks a base at the 1′-position.

[0327] An “alkyl” group refers to a saturated aliphatic hydrocarbon, including straight-chain, branched-chain, and cyclic alkyl groups. Preferably, the alkyl group has 1 to 12 carbons. More preferably, it is a lower alkyl of from 1 to 7 carbons, more preferably 1 to 4 carbons. The alkyl group can be substituted or unsubstituted. When substituted the substituted group(s) is preferably, hydroxyl, cyano, alkoxy, ═O, ═S, NO₂ or N(CH₃)₂, amino, or SH. The term also includes alkenyl groups that are unsaturated hydrocarbon groups containing at least one carbon-carbon double bond, including straight-chain, branched-chain, and cyclic groups. Preferably, the alkenyl group has 1 to 12 carbons. More preferably, it is a lower alkenyl of from 1 to 7 carbons, more preferably 1 to 4 carbons. The alkenyl group may be substituted or unsubstituted. When substituted the substituted group(s) is preferably, hydroxyl, cyano, alkoxy, ═O, ═S, NO₂, halogen, N(CH₃)₂, amino, or SH. The term “alkyl” also includes alkynyl groups that have an unsaturated hydrocarbon group containing at least one carbon-carbon triple bond, including straight-chain, branched-chain, and cyclic groups. Preferably, the alkynyl group has 1 to 12 carbons. More preferably, it is a lower alkynyl of from 1 to 7 carbons, more preferably 1 to 4 carbons. The alkynyl group may be substituted or unsubstituted. When substituted the substituted group(s) is preferably, hydroxyl, cyano, alkoxy, ═O, ═S, NO₂ or N(CH₃)₂, amino or SH.

[0328] Such alkyl groups can also include aryl, alkylaryl, carbocyclic aryl, heterocyclic aryl, amide and ester groups. An “aryl” group refers to an aromatic group that has at least one ring having a conjugated pi electron system and includes carbocyclic aryl, heterocyclic aryl and biaryl groups, all of which may be optionally substituted. The preferred substituent(s) of aryl groups are halogen, trihalomethyl, hydroxyl, SH, OH, cyano, alkoxy, alkyl, alkenyl, alkynyl, and amino groups. An “alkylaryl” group refers to an alkyl group (as described above) covalently joined to an aryl group (as described above). Carbocyclic aryl groups are groups wherein the ring atoms on the aromatic ring are all carbon atoms. The carbon atoms are optionally substituted. Heterocyclic aryl groups are groups having from 1 to 3 heteroatoms as ring atoms in the aromatic ring and the remainder of the ring atoms are carbon atoms. Suitable heteroatoms include oxygen, sulfur, and nitrogen, and include furanyl, thienyl, pyridyl, pyrrolyl, N-lower alkyl pyrrolo, pyrimidyl, pyrazinyl, imidazolyl and the like, all optionally substituted. An “amide” refers to an —C(O)—NH—R, where R is either alkyl, aryl, alkylaryl or hydrogen. An “ester” refers to an —C(O)—OR′, where R is either alkyl, aryl, alkylaryl or hydrogen.

[0329] By “nucleotide” as used herein is as recognized in the art to include natural bases (standard), and modified bases well known in the art. Such bases are generally located at the 1′ position of a nucleotide sugar moiety. Nucleotides generally comprise a base, sugar and a phosphate group. The nucleotides can be unmodified or modified at the sugar, phosphate and/or base moiety, (also referred to interchangeably as nucleotide analogs, modified nucleotides, non-natural nucleotides, non-standard nucleotides and other; see, for example, Usman and McSwiggen, supra; Eckstein et al., International PCT Publication No. WO 92/07065; Usman et al., International PCT Publication No. WO 93/15187; Uhlman & Peyman, supra, all are hereby incorporated by reference herein). There are several examples of modified nucleic acid bases known in the art as summarized by Limbach et al., 1994, Nucleic Acids Res. 22, 2183. Some of the non-limiting examples of base modifications that can be introduced into nucleic acid molecules include, inosine, purine, pyridin-4-one, pyridin-2-one, phenyl, pseudouracil, 2, 4, 6-trimethoxy benzene, 3-methyl uracil, dihydrouridine, naphthyl, aminophenyl, 5-alkylcytidines (e.g., 5-methylcytidine), 5-alkyluridines (e.g., ribothymidine), 5-halouridine (e.g., 5-bromouridine) or 6-azapyrimidines or 6-alkylpyrimidines (e.g. 6-methyluridine), propyne, and others (Burgin et al., 1996, Biochemistry, 35, 14090; Uhlman & Peyman, supra). By “modified bases” in this aspect is meant nucleotide bases other than adenine, guanine, cytosine and uracil at 1 position or their equivalents.

[0330] In one embodiment, the invention features modified siNA molecules, with phosphate backbone modifications comprising one or more phosphorothioate, phosphorodithioate, methylphosphonate, phosphotriester, morpholino, amidate carbamate, carboxymethyl, acetamidate, polyamide, sulfonate, sulfonamide, sulfamate, formacetal, thioformacetal, and/or alkylsilyl, substitutions. For a review of oligonucleotide backbone modifications, see Hunziker and Leumann, 1995, Nucleic Acid Analogues: Synthesis and Properties, in Modern Synthetic Methods, VCH, 331-417, and Mesmaeker et al., 1994, Novel Backbone Replacements for Oligonucleotides, in Carbohydrate Modifications in Antisense Research, ACS, 24-39.

[0331] By “abasic” is meant sugar moieties lacking a base or having other chemical groups in place of a base at the 1′ position, see for example Adamic et al., U.S. Pat. No. 5,998,203.

[0332] By “unmodified nucleoside” is meant one of the bases adenine, cytosine, guanine, thymine, or uracil joined to the 1 carbon of β-D-ribo-furanose.

[0333] By “modified nucleoside” is meant any nucleotide base which contains a modification in the chemical structure of an unmodified nucleotide base, sugar and/or phosphate. Non-limiting examples of modified nucleotides are shown by Formulae I-VII and/or other modifications described herein.

[0334] In connection with 2′-modified nucleotides as described for the present invention, by “amino” is meant 2′—NH₂ or 2′-O—NH₂, which can be modified or unmodified. Such modified groups are described, for example, in Eckstein et al., U.S. Pat. No. 5,672,695 and Matulic-Adamic et al., U.S. Pat. No. 6,248,878, which are both incorporated by reference in their entireties.

[0335] Various modifications to nucleic acid siNA structure can be made to enhance the utility of these molecules. Such modifications will enhance shelf-life, half-life in vitro, stability, and ease of introduction of such oligonucleotides to the target site, e.g., to enhance penetration of cellular membranes, and confer the ability to recognize and bind to targeted cells.

### Administration of Nucleic Acid Molecules

[0336] A siNA molecule of the invention can be adapted for use to prevent or treat cancer, inflammatory, autoimmune, neuroligic, ocular, respiratory, allergic, and/or proliferative diseases, conditions, or disorders, and/or any other trait, disease, disorder or condition that is related to or will respond to the levels of MAP kinase in a cell or tissue, alone or in combination with other therapies. For example, a siNA molecule can comprise a delivery vehicle, including liposomes, for administration to a subject, carriers and diluents and their salts, and/or can be present in pharmaceutically acceptable formulations. Methods for the delivery of nucleic acid molecules are described in Akhtar et al., 1992, Trends Cell Bio., 2, 139; Delivery Strategies for Antisense Oligonucleotide Therapeutics, ed. Akhtar, 1995, Maurer et al., 1999, Mol. Membr. Biol., 16, 129-140; Hofland and Huang, 1999, Handb. Exp. Pharmacol., 137, 165-192; and Lee et al., 2000, ACS Symp. Ser., 752, 184-192, all of which are incorporated herein by reference. Beigelman et al., U.S. Pat. No. 6,395,713 and Sullivan et al., PCT WO 94/02595 further describe the general methods for delivery of nucleic acid molecules. These protocols can be utilized for the delivery of virtually any nucleic acid molecule. Nucleic acid molecules can be administered to cells by a variety of methods known to those of skill in the art, including, but not restricted to, encapsulation in liposomes, by iontophoresis, or by incorporation into other vehicles, such as biodegradable polymers, hydrogels, cyclodextrins (see for example Gonzalez et al., 1999, Bioconjugate Chem., 10, 1068-1074; Wang et al., International PCT publication Nos. WO 03/47518 and WO 03/46185), poly(lactic-co-glycolic)acid (PLGA) and PLCA microspheres (see for example U.S. Pat. No. 6,447,796 and US Patent Application Publication No. US 2002130430), biodegradable nanocapsules, and bioadhesive microspheres, or by proteinaceous vectors (O'Hare and Normand, International PCT Publication No. WO 00/53722). Alternatively, the nucleic acid/vehicle combination is locally delivered by direct injection or by use of an infusion pump. Direct injection of the nucleic acid molecules of the invention, whether subcutaneous, intramuscular, or intradermal, can take place using standard needle and syringe methodologies, or by needle-free technologies such as those described in Conry et al., 1999, Clin. Cancer Res., 5, 2330-2337 and Barry et al., International PCT Publication No. WO 99/31262. The molecules of the instant invention can be used as pharmaceutical agents. Pharmaceutical agents prevent, modulate the occurrence, or treat (alleviate a symptom to some extent, preferably all of the symptoms) of a disease state in a subject.

[0337] In another embodiment, the nucleic acid molecules of the invention can also be formulated or complexed with polyethyleneimine and derivatives thereof, such as polyethyleneimine-polyethyleneglycol-N-acetylgalactosamine (PEI-PEG-GAL) or polyethyleneimine-polyethyleneglycol-tri-N-acetylgalactosamine (PEI-PEG-triGAL) derivatives. In one embodiment, the nucleic acid molecules of the invention are formulated as described in United States Patent Application Publication No. 20030077829, incorporated by reference herein in its entirety.

[0338] In one embodiment, a siNA molecule of the invention is complexed with membrane disruptive agents such as those described in U.S. Patent Application Publication No. 20010007666, incorporated by reference herein in its entirety including the drawings. In another embodiment, the membrane disruptive agent or agents and the siNA molecule are also complexed with a cationic lipid or helper lipid molecule, such as those lipids described in U.S. Pat. No. 6,235,310, incorporated by reference herein in its entirety including the drawings.

[0339] In one embodiment, a siNA molecule of the invention is complexed with delivery systems as described in U.S. Patent Application Publication No. 2003077829 and International PCT Publication Nos. WO 00/03683 and WO 02/087541, all incorporated by reference herein in their entirety including the drawings.

[0340] In one embodiment, the nucleic acid molecules of the invention are administered via pulmonary delivery, such as by inhalation of an aerosol or spray dried formulation administered by an inhalation device or nebulizer, providing rapid local uptake of the nucleic acid molecules into relevant pulmonary tissues. Solid particulate compositions containing respirable dry particles of micronized nucleic acid compositions can be prepared by grinding dried or lyophilized nucleic acid compositions, and then passing the micronized composition through, for example, a 400 mesh screen to break up or separate out large agglomerates. A solid particulate composition comprising the nucleic acid compositions of the invention can optionally contain a dispersant which serves to facilitate the formation of an aerosol as well as other therapeutic compounds. A suitable dispersant is lactose, which can be blended with the nucleic acid compound in any suitable ratio, such as a 1 to 1 ratio by weight.

[0341] Aerosols of liquid particles comprising a nucleic acid composition of the invention can be produced by any suitable means, such as with a nebulizer (see for example U.S. Pat. No. 4,501,729). Nebulizers are commercially available devices which transform solutions or suspensions of an active ingredient into a therapeutic aerosol mist either by means of acceleration of a compressed gas, typically air or oxygen, through a narrow venturi orifice or by means of ultrasonic agitation. Suitable formulations for use in nebulizers comprise the active ingredient in a liquid carrier in an amount of up to 40% w/w preferably less than 20% w/w of the formulation. The carrier is typically water or a dilute aqueous alcoholic solution, preferably made isotonic with body fluids by the addition of, for example, sodium chloride or other suitable salts. Optional additives include preservatives if the formulation is not prepared sterile, for example, methyl hydroxybenzoate, anti-oxidants, flavorings, volatile oils, buffering agents and emulsifiers and other formulation surfactants. The aerosols of solid particles comprising the active composition and surfactant can likewise be produced with any solid particulate aerosol generator. Aerosol generators for administering solid particulate therapeutics to a subject produce particles which are respirable, as explained above, and generate a volume of aerosol containing a predetermined metered dose of a therapeutic composition at a rate suitable for human administration. One illustrative type of solid particulate aerosol generator is an insufflator. Suitable formulations for administration by insufflation include finely comminuted powders which can be delivered by means of an insufflator. In the insufflator, the powder, e.g., a metered dose thereof effective to carry out the treatments described herein, is contained in capsules or cartridges, typically made of gelatin or plastic, which are either pierced or opened in situ and the powder delivered by air drawn through the device upon inhalation or by means of a manually-operated pump. The powder employed in the insufflator consists either solely of the active ingredient or of a powder blend comprising the active ingredient, a suitable powder diluent, such as lactose, and an optional surfactant. The active ingredient typically comprises from 0.1 to 100 w/w of the formulation. A second type of illustrative aerosol generator comprises a metered dose inhaler. Metered dose inhalers are pressurized aerosol dispensers, typically containing a suspension or solution formulation of the active ingredient in a liquified propellant. During use these devices discharge the formulation through a valve adapted to deliver a metered volume to produce a fine particle spray containing the active ingredient. Suitable propellants include certain chlorofluorocarbon compounds, for example, dichlorodifluoromethane, trichlorofluoromethane, dichlorotetrafluoroethane and mixtures thereof. The formulation can additionally contain one or more co-solvents, for example, ethanol, emulsifiers and other formulation surfactants, such as oleic acid or sorbitan trioleate, anti-oxidants and suitable flavoring agents. Other methods for pulmonary delivery are described in, for example US Patent Application No. 20040037780, and U.S. Pat. Nos. 6,592,904; 6,582,728; 6,565,885.

[0342] In one embodiment, a compound, molecule, or composition for the treatment of ocular diseases, disorders and/or conditions (e.g., macular degeneration, diabetic retinopathy etc.) is administered to a subject intraocularly or by intraocular means. In another embodiment, a compound, molecule, or composition for the treatment of ocular conditions (e.g., macular degeneration, diabetic retinopathy etc.) is administered to a subject periocularly or by periocular means (see for example Ahlheim et al., International PCT publication No. WO 03/24420). In one embodiment, a siNA molecule and/or formulation or composition thereof is administered to a subject intraocularly or by intraocular means. In another embodiment, a siNA molecule and/or formulation or composition thereof is administered to a subject periocularly or by periocular means. Periocular administration generally provides a less invasive approach to administering siNA molecules and formulation or composition thereof to a subject (see for example Ahlheim et al., International PCT publication No. WO 03/24420). The use of periocular administration also minimizes the risk of retinal detachment, allows for more frequent dosing or administration, provides a clinically relevant route of administration for macular degeneration and other optic conditions, and also provides the possibility of using reservoirs (e.g., implants, pumps or other devices) for drug delivery.

[0343] In addition, the invention features the use of methods to deliver the nucleic acid molecules of the instant invention to the central nervous system and/or peripheral nervous system. Experiments have demonstrated the efficient in vivo uptake of nucleic acids by neurons. As an example of local administration of nucleic acids to nerve cells, Sommer et al., 1998, Antisense Nuc. Acid Drug Dev., 8, 75, describe a study in which a 15mer phosphorothioate antisense nucleic acid molecule to c-fos is administered to rats via microinjection into the brain. Antisense molecules labeled with tetramethylrhodamine-isothiocyanate (TRITC) or fluorescein isothiocyanate (FITC) were taken up by exclusively by neurons thirty minutes post-injection. A diffuse cytoplasmic staining and nuclear staining was observed in these cells. As an example of systemic administration of nucleic acid to nerve cells, Epa et al., 2000, Antisense Nuc. Acid Drug Dev., 10, 469, describe an in vivo mouse study in which beta-cyclodextrin-adamantane-oligonucleotide conjugates were used to target the p75 neurotrophin receptor in neuronally differentiated PC12 cells. Following a two week course of IP administration, pronounced uptake of p75 neurotrophin receptor antisense was observed in dorsal root ganglion (DRG) cells. In addition, a marked and consistent down-regulation of p75 was observed in DRG neurons. Additional approaches to the targeting of nucleic acid to neurons are described in Broaddus et al., 1998, J. Neurosurg., 88(4), 734; Karle et al., 1997, Eur. J. Pharmocol., 340(2/3), 153; Bannai et al., 1998, Brain Research, 784(1,2), 304; Rajakumar et al., 1997, Synapse, 26(3), 199; Wu-pong et al., 1999, BioPharm, 12(1), 32; Bannai et al., 1998, Brain Res. Protoc., 3(1), 83; Simantov et al., 1996, Neuroscience, 74(1), 39. Nucleic acid molecules of the invention are therefore amenable to delivery to and uptake by cells that express repeat expansion allelic variants for modulation of RE gene expression. The delivery of nucleic acid molecules of the invention, targeting RE is provided by a variety of different strategies. Traditional approaches to CNS delivery that can be used include, but are not limited to, intrathecal and intracerebroventricular administration, implantation of catheters and pumps, direct injection or perfusion at the site of injury or lesion, injection into the brain arterial system, or by chemical or osmotic opening of the blood-brain barrier. Other approaches can include the use of various transport and carrier systems, for example though the use of conjugates and biodegradable polymers. Furthermore, gene therapy approaches, for example as described in Kaplitt et al., U.S. Pat. No. 6,180,613 and Davidson, WO 04/013280, can be used to express nucleic acid molecules in the CNS.

[0344] In one embodiment, delivery systems of the invention include, for example, aqueous and nonaqueous gels, creams, multiple emulsions, microemulsions, liposomes, ointments, aqueous and nonaqueous solutions, lotions, aerosols, hydrocarbon bases and powders, and can contain excipients such as solubilizers, permeation enhancers (e.g., fatty acids, fatty acid esters, fatty alcohols and amino acids), and hydrophilic polymers (e.g., polycarbophil and polyvinylpyrolidone). In one embodiment, the pharmaceutically acceptable carrier is a liposome or a transdermal enhancer. Examples of liposomes which can be used in this invention include the following: (1) CellFectin, 1:1.5 (M/M) liposome formulation of the cationic lipid N,NI,NII,NIII-tetramethyl-N,NI,NII,NIII-tetrapalmit-y-spermine and dioleoyl phosphatidylethanolamine (DOPE) (GIBCO BRL); (2) Cytofectin GSV, 2:1 (M/M) liposome formulation of a cationic lipid and DOPE (Glen Research); (3) DOTAP (N-[1-(2,3-dioleoyloxy)-N,N,N-tri-methyl-ammoniummethylsulfate) (Boehringer Manheim); and (4) Lipofectamine, 3:1 (M/M) liposome formulation of the polycationic lipid DOSPA and the neutral lipid DOPE (GIBCO BRL).

[0345] In one embodiment, delivery systems of the invention include patches, tablets, suppositories, pessaries, gels and creams, and can contain excipients such as solubilizers and enhancers (e.g., propylene glycol, bile salts and amino acids), and other vehicles (e.g., polyethylene glycol, fatty acid esters and derivatives, and hydrophilic polymers such as hydroxypropylmethylcellulose and hyaluronic acid).

[0346] In one embodiment, siNA molecules of the invention are formulated or complexed with polyethylenimine (e.g., linear or branched PEI) and/or polyethylenimine derivatives, including for example grafted PEIs such as galactose PEI, cholesterol PEI, antibody derivatized PEI, and polyethylene glycol PEI (PEG-PEI) derivatives thereof (see for example Ogris et al., 2001, AAPA PharmSci, 3, 1-11; Furgeson et al., 2003, Bioconjugate Chem., 14, 840-847; Kunath et al., 2002, Phramaceutical Research, 19, 810-817; Choi et al., 2001, Bull. Korean Chem. Soc., 22, 46-52; Bettinger et al., 1999, Bioconjugate Chem., 10, 558-561; Peterson et al., 2002, Bioconjugate Chem., 13, 845-854; Erbacher et al., 1999, Journal of Gene Medicine Preprint, 1, 1-18; Godbey et al., 1999., PNAS USA, 96, 5177-5181; Godbey et al., 1999, Journal of Controlled Release, 60, 149-160; Diebold et al., 1999, Journal of Biological Chemistry, 274, 19087-19094; Thomas and Klibanov, 2002, PNAS USA, 99, 14640-14645; and Sagara, U.S. Pat. No. 6,586,524, incorporated by reference herein.

[0347] In one embodiment, a siNA molecule of the invention comprises a bioconjugate, for example a nucleic acid conjugate as described in Vargeese et al., U.S. Ser. No. 10/427,160, filed Apr. 30, 2003; U.S. Pat. No. 6,528,631; U.S. Pat. No. 6,335,434; U.S. Pat. No. 6,235,886; U.S. Pat. No. 6,153,737; U.S. Pat. No. 5,214,136; U.S. Pat. No. 5,138,045, all incorporated by reference herein.

[0348] Thus, the invention features a pharmaceutical composition comprising one or more nucleic acid(s) of the invention in an acceptable carrier, such as a stabilizer, buffer, and the like. The polynucleotides of the invention can be administered (e.g., RNA, DNA or protein) and introduced to a subject by any standard means, with or without stabilizers, buffers, and the like, to form a pharmaceutical composition. When it is desired to use a liposome delivery mechanism, standard protocols for formation of liposomes can be followed. The compositions of the present invention can also be formulated and used as creams, gels, sprays, oils and other suitable compositions for topical, dermal, or transdermal administration as is known in the art.

[0349] The present invention also includes pharmaceutically acceptable formulations of the compounds described. These formulations include salts of the above compounds, e.g., acid addition salts, for example, salts of hydrochloric, hydrobromic, acetic acid, and benzene sulfonic acid.

[0350] A pharmacological composition or formulation refers to a composition or formulation in a form suitable for administration, e.g., systemic or local administration, into a cell or subject, including for example a human. Suitable forms, in part, depend upon the use or the route of entry, for example oral, transdermal, or by injection. Such forms should not prevent the composition or formulation from reaching a target cell (i.e., a cell to which the negatively charged nucleic acid is desirable for delivery). For example, pharmacological compositions injected into the blood stream should be soluble. Other factors are known in the art, and include considerations such as toxicity and forms that prevent the composition or formulation from exerting its effect.

[0351] In one embodiment, siNA molecules of the invention are administered to a subject by systemic administration in a pharmaceutically acceptable composition or formulation. By “systemic administration” is meant in vivo systemic absorption or accumulation of drugs in the blood stream followed by distribution throughout the entire body. Administration routes that lead to systemic absorption include, without limitation: intravenous, subcutaneous, intraperitoneal, inhalation, oral, intrapulmonary and intramuscular. Each of these administration routes exposes the siNA molecules of the invention to an accessible diseased tissue. The rate of entry of a drug into the circulation has been shown to be a function of molecular weight or size. The use of a liposome or other drug carrier comprising the compounds of the instant invention can potentially localize the drug, for example, in certain tissue types, such as the tissues of the reticular endothelial system (RES). A liposome formulation that can facilitate the association of drug with the surface of cells, such as, lymphocytes and macrophages is also useful. This approach can provide enhanced delivery of the drug to target cells by taking advantage of the specificity of macrophage and lymphocyte immune recognition of abnormal cells.

[0352] By “pharmaceutically acceptable formulation” or “pharmaceutically acceptable composition” is meant, a composition or formulation that allows for the effective distribution of the nucleic acid molecules of the instant invention in the physical location most suitable for their desired activity. Non-limiting examples of agents suitable for formulation with the nucleic acid molecules of the instant invention include: P-glycoprotein inhibitors (such as Pluronic P85),; biodegradable polymers, such as poly (DL-lactide-coglycolide) microspheres for sustained release delivery (Emerich, D F et al, 1999, Cell Transplant, 8, 47-58); and loaded nanoparticles, such as those made of polybutylcyanoacrylate. Other non-limiting examples of delivery strategies for the nucleic acid molecules of the instant invention include material described in Boado et al., 1998, J. Pharm. Sci., 87, 1308-1315; Tyler et al., 1999, FEBS Lett., 421, 280-284; Pardridge et al., 1995, PNAS USA., 92, 5592-5596; Boado, 1995, Adv. Drug Delivery Rev., 15, 73-107; Aldrian-Herrada et al., 1998, Nucleic Acids Res., 26, 4910-4916; and Tyler et al., 1999, PNAS USA., 96, 7053-7058.

[0353] The invention also features the use of the composition comprising surface-modified liposomes containing poly (ethylene glycol) lipids (PEG-modified, or long-circulating liposomes or stealth liposomes). These formulations offer a method for increasing the accumulation of drugs in target tissues. This class of drug carriers resists opsonization and elimination by the mononuclear phagocytic system (MPS or RES), thereby enabling longer blood circulation times and enhanced tissue exposure for the encapsulated drug (Lasic et al. Chem. Rev. 1995, 95, 2601-2627; Ishiwata et al., Chem. Pharm. Bull. 1995, 43, 1005-1011). Such liposomes have been shown to accumulate selectively in tumors, presumably by extravasation and capture in the neovascularized target tissues (Lasic et al., Science 1995, 267, 1275-1276; Oku et al., 1995, Biochim. Biophys. Acta, 1238, 86-90). The long-circulating liposomes enhance the pharmacokinetics and pharmacodynamics of DNA and RNA, particularly compared to conventional cationic liposomes which are known to accumulate in tissues of the MPS (Liu et al., J. Biol. Chem. 1995, 42, 24864-24870; Choi et al., International PCT Publication No. WO 96/10391; Ansell et al., International PCT Publication No. WO 96/10390; Holland et al., International PCT Publication No. WO 96/10392). Long-circulating liposomes are also likely to protect drugs from nuclease degradation to a greater extent compared to cationic liposomes, based on their ability to avoid accumulation in metabolically aggressive MPS tissues such as the liver and spleen.

[0354] The present invention also includes compositions prepared for storage or administration that include a pharmaceutically effective amount of the desired compounds in a pharmaceutically acceptable carrier or diluent. Acceptable carriers or diluents for therapeutic use are well known in the pharmaceutical art, and are described, for example, in Remington's Pharmaceutical Sciences, Mack Publishing Co. (A. R. Gennaro edit. 1985), hereby incorporated by reference herein. For example, preservatives, stabilizers, dyes and flavoring agents can be provided. These include sodium benzoate, sorbic acid and esters of p-hydroxybenzoic acid. In addition, antioxidants and suspending agents can be used.

[0355] A pharmaceutically effective dose is that dose required to prevent, inhibit the occurrence, or treat (alleviate a symptom to some extent, preferably all of the symptoms) of a disease state. The pharmaceutically effective dose depends on the type of disease, the composition used, the route of administration, the type of mammal being treated, the physical characteristics of the specific mammal under consideration, concurrent medication, and other factors that those skilled in the medical arts will recognize. Generally, an amount between 0.1 mg/kg and 100 mg/kg body weight/day of active ingredients is administered dependent upon potency of the negatively charged polymer.

[0356] The nucleic acid molecules of the invention and formulations thereof can be administered orally, topically, parenterally, by inhalation or spray, or rectally in dosage unit formulations containing conventional non-toxic pharmaceutically acceptable carriers, adjuvants and/or vehicles. The term parenteral as used herein includes percutaneous, subcutaneous, intravascular (e.g., intravenous), intramuscular, or intrathecal injection or infusion techniques and the like. In addition, there is provided a pharmaceutical formulation comprising a nucleic acid molecule of the invention and a pharmaceutically acceptable carrier. One or more nucleic acid molecules of the invention can be present in association with one or more non-toxic pharmaceutically acceptable carriers and/or diluents and/or adjuvants, and if desired other active ingredients. The pharmaceutical compositions containing nucleic acid molecules of the invention can be in a form suitable for oral use, for example, as tablets, troches, lozenges, aqueous or oily suspensions, dispersible powders or granules, emulsion, hard or soft capsules, or syrups or elixirs.

[0357] Compositions intended for oral use can be prepared according to any method known to the art for the manufacture of pharmaceutical compositions and such compositions can contain one or more such sweetening agents, flavoring agents, coloring agents or preservative agents in order to provide pharmaceutically elegant and palatable preparations. Tablets contain the active ingredient in admixture with non-toxic pharmaceutically acceptable excipients that are suitable for the manufacture of tablets. These excipients can be, for example, inert diluents; such as calcium carbonate, sodium carbonate, lactose, calcium phosphate or sodium phosphate; granulating and disintegrating agents, for example, corn starch, or alginic acid; binding agents, for example starch, gelatin or acacia; and lubricating agents, for example magnesium stearate, stearic acid or talc. The tablets can be uncoated or they can be coated by known techniques. In some cases such coatings can be prepared by known techniques to delay disintegration and absorption in the gastrointestinal tract and thereby provide a sustained action over a longer period. For example, a time delay material such as glyceryl monosterate or glyceryl distearate can be employed.

[0358] Formulations for oral use can also be presented as hard gelatin capsules wherein the active ingredient is mixed with an inert solid diluent, for example, calcium carbonate, calcium phosphate or kaolin, or as soft gelatin capsules wherein the active ingredient is mixed with water or an oil medium, for example peanut oil, liquid paraffin or olive oil.

[0359] Aqueous suspensions contain the active materials in a mixture with excipients suitable for the manufacture of aqueous suspensions. Such excipients are suspending agents, for example sodium carboxymethylcellulose, methylcellulose, hydropropyl-methylcellulose, sodium alginate, polyvinylpyrrolidone, gum tragacanth and gum acacia; dispersing or wetting agents can be a naturally-occurring phosphatide, for example, lecithin, or condensation products of an alkylene oxide with fatty acids, for example polyoxyethylene stearate, or condensation products of ethylene oxide with long chain aliphatic alcohols, for example heptadecaethyleneoxycetanol, or condensation products of ethylene oxide with partial esters derived from fatty acids and a hexitol such as polyoxyethylene sorbitol monooleate, or condensation products of ethylene oxide with partial esters derived from fatty acids and hexitol anhydrides, for example polyethylene sorbitan monooleate. The aqueous suspensions can also contain one or more preservatives, for example ethyl, or n-propyl p-hydroxybenzoate, one or more coloring agents, one or more flavoring agents, and one or more sweetening agents, such as sucrose or saccharin.

[0360] Oily suspensions can be formulated by suspending the active ingredients in a vegetable oil, for example arachis oil, olive oil, sesame oil or coconut oil, or in a mineral oil such as liquid paraffin. The oily suspensions can contain a thickening agent, for example beeswax, hard paraffin or cetyl alcohol. Sweetening agents and flavoring agents can be added to provide palatable oral preparations. These compositions can be preserved by the addition of an anti-oxidant such as ascorbic acid

[0361] Dispersible powders and granules suitable for preparation of an aqueous suspension by the addition of water provide the active ingredient in admixture with a dispersing or wetting agent, suspending agent and one or more preservatives. Suitable dispersing or wetting agents or suspending agents are exemplified by those already mentioned above. Additional excipients, for example sweetening, flavoring and coloring agents, can also be present.

[0362] Pharmaceutical compositions of the invention can also be in the form of oil-in-water emulsions. The oily phase can be a vegetable oil or a mineral oil or mixtures of these. Suitable emulsifying agents can be naturally-occurring gums, for example gum acacia or gum tragacanth, naturally-occurring phosphatides, for example soy bean, lecithin, and esters or partial esters derived from fatty acids and hexitol, anhydrides, for example sorbitan monooleate, and condensation products of the said partial esters with ethylene oxide, for example polyoxyethylene sorbitan monooleate. The emulsions can also contain sweetening and flavoring agents.

[0363] Syrups and elixirs can be formulated with sweetening agents, for example glycerol, propylene glycol, sorbitol, glucose or sucrose. Such formulations can also contain a demulcent, a preservative and flavoring and coloring agents. The pharmaceutical compositions can be in the form of a sterile injectable aqueous or oleaginous suspension. This suspension can be formulated according to the known art using those suitable dispersing or wetting agents and suspending agents that have been mentioned above. The sterile injectable preparation can also be a sterile injectable solution or suspension in a non-toxic parentally acceptable diluent or solvent, for example as a solution in 1,3-butanediol. Among the acceptable vehicles and solvents that can be employed are water, Ringer's solution and isotonic sodium chloride solution. In addition, sterile, fixed oils are conventionally employed as a solvent or suspending medium. For this purpose, any bland fixed oil can be employed including synthetic mono-or diglycerides. In addition, fatty acids such as oleic acid find use in the preparation of injectables.

[0364] The nucleic acid molecules of the invention can also be administered in the form of suppositories, e.g., for rectal administration of the drug. These compositions can be prepared by mixing the drug with a suitable non-irritating excipient that is solid at ordinary temperatures but liquid at the rectal temperature and will therefore melt in the rectum to release the drug. Such materials include cocoa butter and polyethylene glycols.

[0365] Nucleic acid molecules of the invention can be administered parenterally in a sterile medium. The drug, depending on the vehicle and concentration used, can either be suspended or dissolved in the vehicle. Advantageously, adjuvants such as local anesthetics, preservatives and buffering agents can be dissolved in the vehicle.

[0366] Dosage levels of the order of from about 0.1 mg to about 140 mg per kilogram of body weight per day are useful in the treatment of the above-indicated conditions (about 0.5 mg to about 7 g per subject per day). The amount of active ingredient that can be combined with the carrier materials to produce a single dosage form varies depending upon the host treated and the particular mode of administration. Dosage unit forms generally contain between from about 1 mg to about 500 mg of an active ingredient.

[0367] It is understood that the specific dose level for any particular subject depends upon a variety of factors including the activity of the specific compound employed, the age, body weight, general health, sex, diet, time of administration, route of administration, and rate of excretion, drug combination and the severity of the particular disease undergoing therapy.

[0368] For administration to non-human animals, the composition can also be added to the animal feed or drinking water. It can be convenient to formulate the animal feed and drinking water compositions so that the animal takes in a therapeutically appropriate quantity of the composition along with its diet. It can also be convenient to present the composition as a premix for addition to the feed or drinking water.

[0369] The nucleic acid molecules of the present invention can also be administered to a subject in combination with other therapeutic compounds to increase the overall therapeutic effect. The use of multiple compounds to treat an indication can increase the beneficial effects while reducing the presence of side effects.

[0370] In one embodiment, the invention comprises compositions suitable for administering nucleic acid molecules of the invention to specific cell types. For example, the asialoglycoprotein receptor (ASGPr) (Wu and Wu, 1987, J. Biol. Chem. 262, 4429-4432) is unique to hepatocytes and binds branched galactose-terminal glycoproteins, such as asialoorosomucoid (ASOR). In another example, the folate receptor is overexpressed in many cancer cells. Binding of such glycoproteins, synthetic glycoconjugates, or folates to the receptor takes place with an affinity that strongly depends on the degree of branching of the oligosaccharide chain, for example, triatennary structures are bound with greater affinity than biatenarry or monoatennary chains (Baenziger and Fiete, 1980, Cell, 22, 611-620; Connolly et al., 1982, J. Biol. Chem., 257, 939-945). Lee and Lee, 1987, Glycoconjugate J., 4, 317-328, obtained this high specificity through the use of N-acetyl-D-galactosamine as the carbohydrate moiety, which has higher affinity for the receptor, compared to galactose. This “clustering effect” has also been described for the binding and uptake of mannosyl-terminating glycoproteins or glycoconjugates (Ponpipom et al., 1981, J. Med. Chem., 24, 1388-1395). The use of galactose, galactosamine, or folate based conjugates to transport exogenous compounds across cell membranes can provide a targeted delivery approach to, for example, the treatment of liver disease, cancers of the liver, or other cancers. The use of bioconjugates can also provide a reduction in the required dose of therapeutic compounds required for treatment. Furthermore, therapeutic bioavailability, pharmacodynamics, and pharmacokinetic parameters can be modulated through the use of nucleic acid bioconjugates of the invention. Non-limiting examples of such bioconjugates are described in Vargeese et al., U.S. Ser. No. 10/201,394, filed Aug. 13, 2001; and Matulic-Adamic et al., U.S. Ser. No. 60/362,016, filed Mar. 6, 2002.

[0371] Alternatively, certain siNA molecules of the instant invention can be expressed within cells from eukaryotic promoters (e.g., Izant and Weintraub, 1985, Science, 229, 345; McGarry and Lindquist, 1986, Proc. Natl. Acad. Sci., USA 83, 399; Scanlon et al., 1991, Proc. Natl. Acad. Sci. USA, 88, 10591-5; Kashani-Sabet et al., 1992, Antisense Res. Dev., 2, 3-15; propulic et al., 1992, J. Virol., 66, 1432-41; Weerasinghe et al., 1991, J. Virol., 65, 5531-4; Ojwang et al., 1992, Proc. Natl. Acad. Sci. USA, 89, 10802-6; Chen et al., 1992, Nucleic Acids Res., 20, 4581-9; Sarver et al., 1990 Science, 247, 1222-1225; Thompson et al., 1995, Nucleic Acids Res., 23, 2259; Good et al., 1997, Gene Therapy, 4, 45. Those skilled in the art realize that any nucleic acid can be expressed in eukaryotic cells from the appropriate DNA/RNA vector. The activity of such nucleic acids can be augmented by their release from the primary transcript by a enzymatic nucleic acid (Draper et al., PCT WO 93/23569, and Sullivan et al., PCT WO 94/02595; Ohkawa et al., 1992, Nucleic Acids Symp. Ser., 27, 15-6; Taira et al., 1991, Nucleic Acids Res., 19, 5125-30; Ventura et al., 1993, Nucleic Acids Res., 21, 3249-55; Chowrira et al., 1994, J. Biol. Chem., 269, 25856.

[0372] In another aspect of the invention, RNA molecules of the present invention can be expressed from transcription units (see for example Couture et al., 1996, TIG., 12, 510) inserted into DNA or RNA vectors. The recombinant vectors can be DNA plasmids or viral vectors. siNA expressing viral vectors can be constructed based on, but not limited to, adeno-associated virus, retrovirus, adenovirus, or alphavirus. In another embodiment, pol III based constructs are used to express nucleic acid molecules of the invention (see for example Thompson, U.S. Pats. Nos. 5,902,880 and 6,146,886). The recombinant vectors capable of expressing the siNA molecules can be delivered as described above, and persist in target cells. Alternatively, viral vectors can be used that provide for transient expression of nucleic acid molecules. Such vectors can be repeatedly administered as necessary. Once expressed, the siNA molecule interacts with the target mRNA and generates an RNAi response. Delivery of siNA molecule expressing vectors can be systemic, such as by intravenous or intramuscular administration, by administration to target cells ex-planted from a subject followed by reintroduction into the subject, or by any other means that would allow for introduction into the desired target cell (for a review see Couture et al., 1996, TIG., 12, 510).

[0373] In one aspect the invention features an expression vector comprising a nucleic acid sequence encoding at least one siNA molecule of the instant invention. The expression vector can encode one or both strands of a siNA duplex, or a single self-complementary strand that self hybridizes into a siNA duplex. The nucleic acid sequences encoding the siNA molecules of the instant invention can be operably linked in a manner that allows expression of the siNA molecule (see for example Paul et al., 2002, Nature Biotechnology, 19, 505; Miyagishi and Taira, 2002, Nature Biotechnology, 19, 497; Lee et al., 2002, Nature Biotechnology, 19, 500; and Novina et al., 2002, Nature Medicine, advance online publication doi: 10.1038/nm725).

[0374] In another aspect, the invention features an expression vector comprising: a) a transcription initiation region (e.g., eukaryotic pol I, II or III initiation region); b) a transcription termination region (e.g., eukaryotic pol I, II or III termination region); and c) a nucleic acid sequence encoding at least one of the siNA molecules of the instant invention, wherein said sequence is operably linked to said initiation region and said termination region in a manner that allows expression and/or delivery of the siNA molecule. The vector can optionally include an open reading frame (ORF) for a protein operably linked on the 5′ side or the 3′-side of the sequence encoding the siNA of the invention; and/or an intron (intervening sequences).

[0375] Transcription of the siNA molecule sequences can be driven from a promoter for eukaryotic RNA polymerase I (pol I), RNA polymerase II (pol III), or RNA polymerase III (pol III). Transcripts from pol II or pol III promoters are expressed at high levels in all cells; the levels of a given pol II promoter in a given cell type depends on the nature of the gene regulatory sequences (enhancers, silencers, etc.) present nearby. Prokaryotic RNA polymerase promoters are also used, providing that the prokaryotic RNA polymerase enzyme is expressed in the appropriate cells (Elroy-Stein and Moss, 1990, Proc. Natl. Acad. Sci. USA, 87, 6743-7; Gao and Huang 1993, Nucleic Acids Res., 21, 2867-72; Lieber et al., 1993, Methods Enzymol., 217, 47-66; Zhou et al., 1990, Mol. Cell. Biol., 10, 4529-37). Several investigators have demonstrated that nucleic acid molecules expressed from such promoters can function in mammalian cells (e.g. Kashani-Sabet et al., 1992, Antisense Res. Dev., 2, 3-15; Ojwang et al., 1992, Proc. Natl. Acad. Sci. USA, 89, 10802-6; Chen et al., 1992, Nucleic Acids Res., 20, 4581-9; Yu et al., 1993, Proc. Natl. Acad. Sci. USA, 90, 6340-4; L'Huillier et al., 1992, EMBO J., 11, 4411-8; Lisziewicz et al., 1993, Proc. Natl. Acad. Sci. U.S. A, 90, 8000-4; Thompson et al., 1995, Nucleic Acids Res., 23, 2259; Sullenger & Cech, 1993, Science, 262, 1566). More specifically, transcription units such as the ones derived from genes encoding U6 small nuclear (snRNA), transfer RNA (tRNA) and adenovirus VA RNA are useful in generating high concentrations of desired RNA molecules such as siNA in cells (Thompson et al., supra; Couture and Stinchcomb, 1996, supra; Noonberg et al., 1994, Nucleic Acid Res., 22, 2830; Noonberg et al., U.S. Pat. No. 5,624,803; Good et al., 1997, Gene Ther., 4, 45; Beigelman et al., International PCT Publication No. WO 96/18736. The above siNA transcription units can be incorporated into a variety of vectors for introduction into mammalian cells, including but not restricted to, plasmid DNA vectors, viral DNA vectors (such as adenovirus or adeno-associated virus vectors), or viral RNA vectors (such as retroviral or alphavirus vectors) (for a review see Couture and Stinchcomb, 1996, supra).

[0376] In another aspect the invention features an expression vector comprising a nucleic acid sequence encoding at least one of the siNA molecules of the invention in a manner that allows expression of that siNA molecule. The expression vector comprises in one embodiment; a) a transcription initiation region; b) a transcription termination region; and c) a nucleic acid sequence encoding at least one strand of the siNA molecule, wherein the sequence is operably linked to the initiation region and the termination region in a manner that allows expression and/or delivery of the siNA molecule.

[0377] In another embodiment the expression vector comprises: a) a transcription initiation region; b) a transcription termination region; c) an open reading frame; and d) a nucleic acid sequence encoding at least one strand of a siNA molecule, wherein the sequence is operably linked to the 3′-end of the open reading frame and wherein the sequence is operably linked to the initiation region, the open reading frame and the termination region in a manner that allows expression and/or delivery of the siNA molecule. In yet another embodiment, the expression vector comprises: a) a transcription initiation region; b) a transcription termination region; c) an intron; and d) a nucleic acid sequence encoding at least one siNA molecule, wherein the sequence is operably linked to the initiation region, the intron and the termination region in a manner which allows expression and/or delivery of the nucleic acid molecule.

[0378] In another embodiment, the expression vector comprises: a) a transcription initiation region; b) a transcription termination region; c) an intron; d) an open reading frame; and e) a nucleic acid sequence encoding at least one strand of a siNA molecule, wherein the sequence is operably linked to the 3′-end of the open reading frame and wherein the sequence is operably linked to the initiation region, the intron, the open reading frame and the termination region in a manner which allows expression and/or delivery of the siNA molecule.

[0379] MAP Kinase Biology and Biochemistry

[0380] The mitogen-activated protein kinases (MAPKs) have been at the forefront of a rapid advance in the understanding of cellular events in growth factor and cytokine receptor signaling. The MAP kinases (also referred to as extracellular signal-regulated protein kinases, or ERKs) are the terminal enzymes in a three-kinase cascade. The reiteration of three-kinase cascades for related but distinct signaling pathways gave rise to the concept of a MAPK pathway as a modular, multifunctional signaling element that acts sequentially within one pathway, where each enzyme phosphorylates and thereby activates the next member in the sequence. A typical MAPK pathway thus consists of three protein kinases: a MAPK kinase kinase (or MEKK) that activates a MAPK kinase (or MEK) which, in turn, activates a MAPK/ERK enzyme. Each of the MAPK/ERK, JNK and p38 cascades consists of a three-enzyme module that includes MEKK, MEK and an ERK or MAPK superfamily member. A variety of extracellular signals triggers initial events upon association with their respective cell surface receptors and this signal is then transmitted to the interior of the cell where it activates the appropriate cascades (see for example FIG. 22).

[0381] The identification of distinct MAPK cascades that are conserved across all eukaryotes indicates that the MAPK module has been adapted for interpretation of a diverse array of extracellular signals. Although mitogen activation of the MAPK subfamily (e.g., ERK1 and ERK2) has dominated efforts to understand MAPK signaling, increasing appreciation of the role of the stress-activated kinases, JNK and p38, illustrates the diverse nature of the MAPK superfamily of enzymes. Although sequence similarities among components of the individual MAPK modules used for activation of ERK1/2, JNKs and p38 are considerable, the fidelity that is maintained in order to translate specific extracellular signals into discrete physiological responses illustrates the selective adaptation of each MAPK pathway. The MAPK superfamily of enzymes is a critical component cellular regulative processes that coordinates incoming signals generated by a variety of extracellular and intracellular mediators. Specific phosphorylation and activation of enzymes in the MAPK pathway transmits the signal down the cascade, resulting in phosphorylation of many proteins with substantial regulatory functions throughout the cell, including other protein kinases, transcription factors, cytoskeletal proteins and other enzymes. The diversity of signals that culminates in MAPK activation indicates that these enzymes are not dedicated to regulation of any single growth factor, hormone or cytokine system. Instead, MAPKs—like cAMP-dependent protein kinase (PKA) and Ca²⁺- and phospholipid-dependent protein kinases (PKC) serve many signaling purposes. Because activation of the MAPK pathways are triggered to varying extents by a large number of receptor systems, temporal and spatial differences are critical to determining ligand- and cell-type-specific functions.

[0382] Following activation of cells with an appropriate extracellular stimuli, the signal is transmitted to the canonical MAPK module comprising three protein kinases. The progression of events for each enzyme cascade is the same, although specific isoforms of each enzyme appear to confer the required specificity within each pathway. The first enzyme in the module is a MEKK enzyme, of which Raf and its isoforms are one example. The MEKK enzymes comprise Ser/Thr protein kinases that activate the MEK enzymes by phosphorylating two serine or threonine residues within a Ser-X-X-X-Ser/Thr motif. Once activated, the MEK enzymes, which are hybrid function Ser/Thr/Tyr protein kinases, phosphorylate the MAPK/ERK enzymes on Thr and Tyr residues within the Thr-X-Tyr (TXY) consensus sequence. A critical and common feature of the MAPK superfamily of enzymes is that they are activated upon dual phosphorylation within a TXY consensus sequence present in the activation loop of the catalytic domain. The central amino acid differs for each MAPK superfamily member, corresponding to Glu for ERK1/2, Gly for p38/HOG and Pro for JNK/SAPK, although MEK specificity is not limited to these particular residues. Phosphorylation at only one of the two positions does not appear to activate the enzyme, although it may prime the kinase domain for receipt of the second phosphorylation event.

[0383] ERK1 and ERK2 were the first members of the MAPK superfamily whose cDNAs were cloned and the signaling cascades that lead to their activation characterized. Potent activation of ERK1 and ERK2 can be initiated through activation of transmembrane receptors with intrinsic protein tyrosine kinase (PTK) activity. Binding of extracellular ligands to their respective cell surface receptors results in receptor autophosphorylation and enhanced PTK activity. The subsequent association of the Src homology 2 (SH2) domains of adaptor proteins such as Grb2 and Shc with the autophosphorylated receptors, or with additional docking proteins, provides the molecular interactions that bring the required signal transduction molecules into close proximity with each other. Receptors without intrinsic PTK activity but which comprise sites for tyrosine phosphorylation can also activate the cascade via association of their phosphotyrosine residues with adaptor molecules. For example, the SH3 domain of Grb2 binds a proline-rich region of the guanine nucleotide-exchange protein SOS which, in turn, increases the association of Ras with GTP. The GTP-bound form of Ras binds to Raf (a MAPK kinase) isoforms, including C-Raf-1, B-Raf and A-Raf. This action targets Raf to the membrane, where its protein kinase activity is increased by phosphorylation. MAPK kinases (MEK1 and MEK2), are phosphorylated and activated by Raf. MEK1 and MEK2 are dual-specificity protein kinases that dually phosphorylate the ERK enzymes (corresponding to Thr¹⁸³ and Tyr¹⁸⁵ of p42ERK2), thereby increasing their enzymatic activity by approximately 1,000-fold over the activity found with the basal or monophosphorylated forms. Phosphorylation of these residues causes closure of the kinase active site and induces conformational changes necessary for high activity.

[0384] MAPK mutants, lacking either a lysine required for catalytic activity or the prerequisite TXY phosphorylation sites, can inhibit signaling by the native enzymes in cells. In the case of ERK1 and ERK2, these mutants have been used with repeated success. For example, mutant ERK2 completely blocks proliferation in response to epidermal growth factor (EGF) and v-Raf, and partially blocks induction by serum or small t antigen. ERK1 antisense mRNA and an ERK1 phosphorylation site mutants interfere with thrombin-induced transcription as well as serum-dependent proliferation. These findings suggest an essential role in proliferation and transformation for the ERK/MAPK pathway.

[0385] The JNK/SAPK and p38/HOG pathways are activated by ultraviolet light, cytokines, osmotic shock, inhibitors of DNA, RNA, and protein synthesis, and to a lesser extent by certain growth factors. This spectrum of regulators suggests that the enzymes are transducers of a variety of cellular stress responses. In contrast to activation of ERK1 and ERK2, upstream signal transduction mechanisms for the JNK and p38 cascades are less well understood. When transfected into mammalian cells, a diverse group of protein kinases including the mixed lineage kinases (MLKs) and relatives of the yeast Step 20p, such as the p21-activated kinases (PAKs) and germinal center kinase (GCK), cause activation of JNK/SAPK. Similarly, GTP-bound forms of the small GTP-binding proteins, Rac and Cdc42, activate the JNK/SAPK pathway and, to a lesser extent, the p38 pathway. Direct activation of both pathways by PAKs also has been demonstrated, suggesting that PAKs can be the relevant effectors for these small G proteins. The PAKs are homologs of the yeast kinases Step 20p and Shk1, enzymes upstream of the MAPK modules in yeast pheromone response pathways. Both yeast and mammalian protein kinases contain a binding site for Rac/Cdc42 and share the property of being activated in vitro through association with these small G proteins when in their GTP-bound states. In yeast, Step 20p is thought to phosphorylate and activate the MEKK isoform Ste11p, suggesting that MEKKs may be PAK targets. This summary of MAP kinase pathways has been adapted from Cobb and Schaefer, 1996, Promega Notes Magazine Number 59, page 37.

[0386] The regulation of c-Jun transcriptional activity by Jun N-terminal kinase (JNK), ERK1, ERK2, and p38 kinases has become a paradigm for the understanding of how mitogen-activated protein (MAP) kinase signaling pathways elicit specific changes in gene transcription through selective phosphorylation of nuclear transcription factors. Selective phosphorylation of c-Jun by JNK is detected by a specific docking motif in c-Jun, the delta region, which enables JNK to physically interact with c-Jun. Analogous MAP kinase docking motifs have subsequently been found in several other transcription factors, indicating that this is a general mechanism for ensuring the specificity of signal transduction. Furthermore, genetic and biochemical studies in mice, flies and cultured cells have provided evidence that signals relayed by JNK through c-Jun regulate a wide range of cellular processes including cell proliferation, tumorigenesis, apoptosis and embryonic development. Despite these advances, in most cases, the genes or programs of gene expression downstream of JNK and c-Jun, which control these processes, have yet to be defined. One important process that is associated with JNK gene expression is the development of insulin resistance in obese subjects.

[0387] Obesity is closely associated with insulin resistance and establishes the leading risk factor for type 2 diabetes mellitus in mammals. The c-Jun amino-terminal kinases (JNKs) can interfere with insulin activity in cultured cells and are activated by inflammatory cytokines and free fatty acids molecules that have been implicated in the development of type 2 diabetes. Hirosumi et al, 2002, Nature, 420, 333-336, demonstrate that JNK activity is abnormally elevated in obesity. Furthermore, Hirosumi et al, supra have shown that an absence of JNK1 results in decreased adiposity with significantly improved insulin sensitivity and enhanced insulin receptor capacity in two different models of mouse obesity. Thus, JNK is a crucial mediator of obesity and insulin resistance and as such, provides a potential target for nucleic acid based therapeutics that modulate JNK gene expression.

[0388] The transcription factor and oncogene, c-JUN, is implicated in several critical cell processes including cell proliferation, cell survival, and oncogenic transformation. Although it is broadly expressed in a wide variety of cell types, it plays an especially important role in hepatocytes. However, the precise role played by c-JUN in hepatocytes seems to depend on the differentiation state of this cell type. Adult differentiated hepatocytes depend on c-JUN for progression through the cell cycle. Deletion of c-JUN reduces the proliferation capacity of hepatocytes following partial hepatectomy. c-JUN is thought to be major component in the development of human hepatocellular carcinoma (HCC). HCC is the most common form of primary liver cancer. Chronic HCV infection is a major risk factor for HCC.

[0389] The role of c-JUN in liver cancer has recently been investigated (Eferl et al., 2003, Cell, 112, 181). These investigators deleted c-JUN and then induced liver cancer by chemical carcinogenesis. They observed that deletion of c-JUN dramatically interfered with liver tumor formation. Animal survival was markedly worse in c-JUN wildtype animals relative to deletion mutants. In particular, the number of apoptotic cells increased about five fold in tumors in the c-JUN deletion strain relative to the wildtype animals. Importantly, levels of the pro-apoptotic gene products such as p53 and noxa were elevated in the c-JUN deletion strain. c-JUN is likely to antagonize other pro-apoptotic genes such as TNF-a. Thus, by blocking p53 and its large family of dependent genes, c-JUN seems to promote tumor formation. Since a large fraction of chronically infected HCV patients develop hepatocellular carcinoma, c-JUN provides an attractive target for treating HCV infected pateints to prevent or ameliorate hepatocellular carcinoma.

[0390] Based upon the current understanding of MAP kinase pathways, the modulation of MAP kinase pathways is instrumental in the development of new therapeutics in, for example, the fields of proliferative diseases and conditions and/or cancer including breast cancer, cancers of the head and neck including various lymphomas such as mantle cell lymphoma, non-Hodgkins lymphoma, adenoma, squamous cell carcinoma, laryngeal carcinoma, cancers of the retina, cancers of the esophagus, multiple myeloma, ovarian cancer, uterine cancer, melanoma, colorectal cancer, lung cancer, bladder cancer, prostate cancer, glioblastoma, lung cancer (including non-small cell lung carcinoma), pancreatic cancer, cervical cancer, head and neck cancer, skin cancers, nasopharyngeal carcinoma, liposarcoma, epithelial carcinoma, renal cell carcinoma, gallbladder adeno carcinoma, parotid adenocarcinoma, endometrial sarcoma, multidrug resistant cancers; and proliferative diseases and conditions, such as neovascularization associated with tumor angiogenesis, macular degeneration (e.g., wet/dry AMD), corneal neovascularization, diabetic retinopathy, neovascular glaucoma, myopic degeneration and other proliferative diseases and conditions such as restenosis and polycystic kidney disease,; inflammatory diseases and conditions such as inflammation, acute inflammation, chronic inflammation, atherosclerosis, restenosis, asthma, allergic rhinitis, atopic dermatitis, septic shock, rheumatoid arthritis, inflammatory bowl disease, inflammotory pelvic disease, pain, ocular inflammatory disease, celiac disease, Leigh Syndrome, Glycerol Kinase Deficiency, Familial eosinophilia (FE), autosomal recessive spastic ataxia, laryngeal inflammatory disease; Tuberculosis, Chronic cholecystitis, Bronchiectasis, Silicosis and other pneumoconioses; autoimmune diseases and conditions such as multiple sclerosis, diabetes mellitus, lupus, celiac disease, Crohn's disease, ulcerative colitis, Guillain-Barre syndrome, scleroderms, Goodpasture's syndrome, Wegener's granulomatosis, autoimmune epilepsy, Rasmussen's encephalitis, Primary biliary sclerosis, Sclerosing cholangitis, Autoimmune hepatitis Addison's disease, Hashimoto's thyroiditis, fibromyalgia, Menier's syndrome; and transplantation rejection (e.g., prevention of allograft rejection). As such, modulation of a specific MAP kinase pathway using small interfering nucleic acid (siNA) mediated RNAi represents a novel approach to the treatment and study of diseases and conditions related to a specific MAP kinase activity and/or gene expression.

[0391] The use of small interfering nucleic acid molecules targeting MAP kinase, therefore provides a class of novel therapeutic agents that can be used in the treatment, alleviation, or prevention of cancer, inflammatory, autoimmune, neuroligic, ocular, respiratory, allergic, and/or proliferative diseases, conditions, or disorders, alone or in combination with other therapies.

### EXAMPLES

[0392] The following are non-limiting examples showing the selection, isolation, synthesis and activity of nucleic acids of the instant invention.

### Example 1

### Tandem Synthesis of siNA Constructs

[0393] Exemplary siNA molecules of the invention are synthesized in tandem using a cleavable linker, for example, a succinyl-based linker. Tandem synthesis as described herein is followed by a one-step purification process that provides RNAi molecules in high yield. This approach is highly amenable to siNA synthesis in support of high throughput RNAi screening, and can be readily adapted to multi-column or multi-well synthesis platforms.

[0394] After completing a tandem synthesis of a siNA oligo and its complement in which the 5′-terminal dimethoxytrityl (5′-O-DMT) group remains intact (trityl on synthesis), the oligonucleotides are deprotected as described above. Following deprotection, the siNA sequence strands are allowed to spontaneously hybridize. This hybridization yields a duplex in which one strand has retained the 5′-O-DMT group while the complementary strand comprises a terminal 5′-hydroxyl. The newly formed duplex behaves as a single molecule during routine solid-phase extraction purification (Trityl-On purification) even though only one molecule has a dimethoxytrityl group. Because the strands form a stable duplex, this dimethoxytrityl group (or an equivalent group, such as other trityl groups or other hydrophobic moieties) is all that is required to purify the pair of oligos, for example, by using a C18 cartridge.

[0395] Standard phosphoramidite synthesis chemistry is used up to the point of introducing a tandem linker, such as an inverted deoxy abasic succinate or glyceryl succinate linker (see FIG. 1) or an equivalent cleavable linker. A non-limiting example of linker coupling conditions that can be used includes a hindered base such as diisopropylethylamine (DIPA) and/or DMAP in the presence of an activator reagent such as Bromotripyrrolidinophosphoniumhexafluororophosphate (PyBrOP). After the linker is coupled, standard synthesis chemistry is utilized to complete synthesis of the second sequence leaving the terminal the 5′-O-DMT intact. Following synthesis, the resulting oligonucleotide is deprotected according to the procedures described herein and quenched with a suitable buffer, for example with 50 mM NaOAc or 1.5M NH₄H₂CO₃.

[0396] Purification of the siNA duplex can be readily accomplished using solid phase extraction, for example, using a Waters C18 SepPak 1 g cartridge conditioned with 1 column volume (CV) of acetonitrile, 2 CV H2O, and 2 CV 50 mM NaOAc. The sample is loaded and then washed with 1 CV H2O or 50 mM NaOAc. Failure sequences are eluted with 1 CV 14% ACN (Aqueous with 50 mM NaOAc and 50 mM NaCl). The column is then washed, for example with 1 CV H2O followed by on-column detritylation, for example by passing 1 CV of 1% aqueous trifluoroacetic acid (TFA) over the column, then adding a second CV of 1% aqueous TFA to the column and allowing to stand for approximately 10 minutes. The remaining TFA solution is removed and the column washed with H2O followed by 1 CV 1M NaCl and additional H2O. The siNA duplex product is then eluted, for example, using 1 CV 20% aqueous CAN.

[0397] FIG. 2 provides an example of MALDI-TOF mass spectrometry analysis of a purified siNA construct in which each peak corresponds to the calculated mass of an individual siNA strand of the siNA duplex. The same purified siNA provides three peaks when analyzed by capillary gel electrophoresis (CGE), one peak presumably corresponding to the duplex siNA, and two peaks presumably corresponding to the separate siNA sequence strands. Ion exchange HPLC analysis of the same siNA contract only shows a single peak. Testing of the purified siNA construct using a luciferase reporter assay described below demonstrated the same RNAi activity compared to siNA constructs generated from separately synthesized oligonucleotide sequence strands.

### Example 2

### Identification of Potential siNA Target Sites in any RNA Sequence

[0398] The sequence of an RNA target of interest, such as a viral or human mRNA transcript, is screened for target sites, for example by using a computer folding algorithm. In a non-limiting example, the sequence of a gene or RNA gene transcript derived from a database, such as Genbank, is used to generate siNA targets having complementarity to the target. Such sequences can be obtained from a database, or can be determined experimentally as known in the art. Target sites that are known, for example, those target sites determined to be effective target sites based on studies with other nucleic acid molecules, for example ribozymes or antisense, or those targets known to be associated with a disease or condition such as those sites containing mutations or deletions, can be used to design siNA molecules targeting those sites. Various parameters can be used to determine which sites are the most suitable target sites within the target RNA sequence. These parameters include but are not limited to secondary or tertiary RNA structure, the nucleotide base composition of the target sequence, the degree of homology between various regions of the target sequence, or the relative position of the target sequence within the RNA transcript. Based on these determinations, any number of target sites within the RNA transcript can be chosen to screen siNA molecules for efficacy, for example by using in vitro RNA cleavage assays, cell culture, or animal models. In a non-limiting example, anywhere from 1 to 1000 target sites are chosen within the transcript based on the size of the siNA construct to be used. High throughput screening assays can be developed for screening siNA molecules using methods known in the art, such as with multi-well or multi-plate assays to determine efficient reduction in target gene expression.

### Example 3

### Selection of siNA Molecule Target Sites in a RNA

[0399] The following non-limiting steps can be used to carry out the selection of siNAs targeting a given gene sequence or transcript.
[0400] 1. The target sequence is parsed in silico into a list of all fragments or subsequences of a particular length, for example 23 nucleotide fragments, contained within the target sequence. This step is typically carried out using a custom Perl script, but commercial sequence analysis programs such as Oligo, MacVector, or the GCG Wisconsin Package can be employed as well.
[0401] 2. In some instances the siNAs correspond to more than one target sequence; such would be the case for example in targeting different transcripts of the same gene, targeting different transcripts of more than one gene, or for targeting both the human gene and an animal homolog. In this case, a subsequence list of a particular length is generated for each of the targets, and then the lists are compared to find matching sequences in each list. The subsequences are then ranked according to the number of target sequences that contain the given subsequence; the goal is to find subsequences that are present in most or all of the target sequences. Alternately, the ranking can identify subsequences that are unique to a target sequence, such as a mutant target sequence. Such an approach would enable the use of siNA to target specifically the mutant sequence and not effect the expression of the normal sequence.
[0402] 3. In some instances the siNA subsequences are absent in one or more sequences while present in the desired target sequence; such would be the case if the siNA targets a gene with a paralogous family member that is to remain untargeted. As in case 2 above, a subsequence list of a particular length is generated for each of the targets, and then the lists are compared to find sequences that are present in the target gene but are absent in the untargeted paralog.
[0403] 4. The ranked siNA subsequences can be further analyzed and ranked according to GC content. A preference can be given to sites containing 30-70% GC, with a further preference to sites containing 40-60% GC.
[0404] 5. The ranked siNA subsequences can be further analyzed and ranked according to self-folding and internal hairpins. Weaker internal folds are preferred; strong hairpin structures are to be avoided.
[0405] 6. The ranked siNA subsequences can be further analyzed and ranked according to whether they have runs of GGG or CCC in the sequence. GGG (or even more Gs) in either strand can make oligonucleotide synthesis problematic and can potentially interfere with RNAi activity, so it is avoided whenever better sequences are available. CCC is searched in the target strand because that will place GGG in the antisense strand.
[0406] 7. The ranked siNA subsequences can be further analyzed and ranked according to whether they have the dinucleotide UU (uridine dinucleotide) on the 3′-end of the sequence, and/or AA on the 5′-end of the sequence (to yield 3′ UU on the antisense sequence). These sequences allow one to design siNA molecules with terminal TT thymidine dinucleotides.
[0407] 8. Four or five target sites are chosen from the ranked list of subsequences as described above. For example, in subsequences having 23 nucleotides, the right 21 nucleotides of each chosen 23-mer subsequence are then designed and synthesized for the upper (sense) strand of the siNA duplex, while the reverse complement of the left 21 nucleotides of each chosen 23-mer subsequence are then designed and synthesized for the lower (antisense) strand of the siNA duplex (see Tables II and III). If terminal TT residues are desired for the sequence (as described in paragraph 7), then the two 3′ terminal nucleotides of both the sense and antisense strands are replaced by TT prior to synthesizing the oligos.
[0408] 9. The siNA molecules are screened in an in vitro, cell culture or animal model system to identify the most active siNA molecule or the most preferred target site within the target RNA sequence.
[0409] P 10. Other design considerations can be used when selecting target nucleic acid sequences, see, for example, Reynolds et al., 2004, Nature Biotechnology Advanced Online Publication, 1 Feb. 2004, doi:10.1038/nbt936 and Ui-Tei et al., 2004, Nucleic Acids Research, 32, doi: 10.1093/nar/gkh247.

[0410] In an alternate approach, a pool of siNA constructs specific to a MAP kinase target sequence is used to screen for target sites in cells expressing MAP kinase (e.g., c-JUN, ERK1, ERK2, JNK1, JNK2, and/or p38) RNA, such as such A549 cells, human kidney fibroblast cells (e.g., 293 cells), HeLa cells, or HepG2 cells. The general strategy used in this approach is shown in FIG. 9. A non-limiting example of such is a pool comprising sequences having any of SEQ ID NOS 1-2356. Cells expressing MAP kinase (e.g., c-JUN, ERK1, ERK2, JNK1, JNK2, and/or p38) are transfected with the pool of siNA constructs and cells that demonstrate a phenotype associated with MAP kinase (e.g., c-JUN, ERK1, ERK2, JNK1, JNK2, and/or p38) inhibition are sorted. The pool of siNA constructs can be expressed from transcription cassettes inserted into appropriate vectors (see for example FIG. 7 and FIG. 8). The siNA from cells demonstrating a positive phenotypic change (e.g., decreased proliferation, decreased MAP kinase (e.g., c-JUN, ERK1, ERK2, JNK1, JNK2, and/or p38) mRNA levels or decreased MAP kinase protein expression), are sequenced to determine the most suitable target site(s) within the target MAP kinase (e.g., c-JUN, ERK1, ERK2, JNK1, JNK2, and/or p38) RNA sequence.

### Example 4

### MAP Kinase Targeted siNA Design

[0411] siNA target sites were chosen by analyzing sequences of the MAP kinase RNA target and optionally prioritizing the target sites on the basis of folding (structure of any given sequence analyzed to determine siNA accessibility to the target), by using a library of siNA molecules as described in Example 3, or alternately by using an in vitro siNA system as described in Example 6 herein. siNA molecules were designed that could bind each target and are optionally individually analyzed by computer folding to assess whether the siNA molecule can interact with the target sequence. Varying the length of the siNA molecules can be chosen to optimize activity. Generally, a sufficient number of complementary nucleotide bases are chosen to bind to, or otherwise interact with, the target RNA, but the degree of complementarity can be modulated to accommodate siNA duplexes or varying length or base composition. By using such methodologies, siNA molecules can be designed to target sites within any known RNA sequence, for example those RNA sequences corresponding to the any gene transcript.

[0412] Chemically modified siNA constructs are designed to provide nuclease stability for systemic administration in vivo and/or improved pharmacokinetic, localization, and delivery properties while preserving the ability to mediate RNAi activity. Chemical modifications as described herein are introduced synthetically using synthetic methods described herein and those generally known in the art. The synthetic siNA constructs are then assayed for nuclease stability in serum and/or cellular/tissue extracts (e.g. liver extracts). The synthetic siNA constructs are also tested in parallel for RNAi activity using an appropriate assay, such as a luciferase reporter assay as described herein or another suitable assay that can quantity RNAi activity. Synthetic siNA constructs that possess both nuclease stability and RNAi activity can be further modified and re-evaluated in stability and activity assays. The chemical modifications of the stabilized active siNA constructs can then be applied to any siNA sequence targeting any chosen RNA and used, for example, in target screening assays to pick lead siNA compounds for therapeutic development (see for example FIG. 11).

### Example 5

### Chemical Synthesis and Purification of siNA

[0413] siNA molecules can be designed to interact with various sites in the RNA message, for example, target sequences within the RNA sequences described herein. The sequence of one strand of the siNA molecule(s) is complementary to the target site sequences described above. The siNA molecules can be chemically synthesized using methods described herein. Inactive siNA molecules that are used as control sequences can be synthesized by scrambling the sequence of the siNA molecules such that it is not complementary to the target sequence. Generally, siNA constructs can by synthesized using solid phase oligonucleotide synthesis methods as described herein (see for example Usman et al., U.S. Pat. Nos. 5,804,683; 5,831,071; 5,998,203; 6,117,657; 6,353,098; 6,362,323; 6,437,117; 6,469,158; Scaringe et al., U.S. Pat. Nos. 5,889,136; 6,008,400; 6,111,086 all incorporated by reference herein in their entirety).

[0414] In a non-limiting example, RNA oligonucleotides are synthesized in a stepwise fashion using the phosphoramidite chemistry as is known in the art. Standard phosphoramidite chemistry involves the use of nucleosides comprising any of 5′-O-dimethoxytrityl, 2′-O-tert-butyldimethylsilyl, 3′-O-2-Cyanoethyl N,N-diisopropylphos-phoroamidite groups, and exocyclic amine protecting groups (e.g. N6-benzoyl adenosine, N4 acetyl cytidine, and N2-isobutyryl guanosine). Alternately, 2′-O—Silyl Ethers can be used in conjunction with acid-labile 2′-O-orthoester protecting groups in the synthesis of RNA as described by Scaringe supra. Differing 2′ chemistries can require different protecting groups, for example 2′-deoxy-2′-amino nucleosides can utilize N-phthaloyl protection as described by Usman et al., U.S. Pat. No. 5,631,360, incorporated by reference herein in its entirety).

[0415] During solid phase synthesis, each nucleotide is added sequentially (3′- to 5′-direction) to the solid support-bound oligonucleotide. The first nucleoside at the 3′-end of the chain is covalently attached to a solid support (e.g., controlled pore glass or polystyrene) using various linkers. The nucleotide precursor, a ribonucleoside phosphoramidite, and activator are combined resulting in the coupling of the second nucleoside phosphoramidite onto the 5′-end of the first nucleoside. The support is then washed and any unreacted 5′-hydroxyl groups are capped with a capping reagent such as acetic anhydride to yield inactive 5′-acetyl moieties. The trivalent phosphorus linkage is then oxidized to a more stable phosphate linkage. At the end of the nucleotide addition cycle, the 5′-O-protecting group is cleaved under suitable conditions (e.g., acidic conditions for trityl-based groups and Fluoride for silyl-based groups). The cycle is repeated for each subsequent nucleotide.

[0416] Modification of synthesis conditions can be used to optimize coupling efficiency, for example by using differing coupling times, differing reagent/phosphoramidite concentrations, differing contact times, differing solid supports and solid support linker chemistries depending on the particular chemical composition of the siNA to be synthesized. Deprotection and purification of the siNA can be performed as is generally described in Usman et al., U.S. Pat. No. 5,831,071, U.S. Pat. No. 6,353,098, U.S. Pat. No. 6,437,117, and Bellon et al., U.S. Pat. No. 6,054,576, U.S. Pat. No. 6,162,909, U.S. Pat. No. 6,303,773, or Scaringe supra, incorporated by reference herein in their entireties. Additionally, deprotection conditions can be modified to provide the best possible yield and purity of siNA constructs. For example, applicant has observed that oligonucleotides comprising 2′-deoxy-2′-fluoro nucleotides can degrade under inappropriate deprotection conditions. Such oligonucleotides are deprotected using aqueous methylamine at about 35° C. for 30 minutes. If the 2′-deoxy-2′-fluoro containing oligonucleotide also comprises ribonucleotides, after deprotection with aqueous methylamine at about 35° C. for 30 minutes, TEA-HF is added and the reaction maintained at about 65° C. for an additional 15 minutes.

### Example 6

### RNAi in Vitro Assay to Assess siNA Activity

[0417] An in vitro assay that recapitulates RNAi in a cell-free system is used to evaluate siNA constructs targeting MAP kinase (e.g., c-JUN, ERK1, ERK2, JNK1, JNK2 and/or p38) RNA targets. The assay comprises the system described by Tuschl et al., 1999, Genes and Development, 13, 3191-3197 and Zamore et al., 2000, Cell, 101, 25-33 adapted for use with MAP kinase target RNA. A Drosophila extract derived from syncytial blastoderm is used to reconstitute RNAi activity in vitro. Target RNA is generated via in vitro transcription from an appropriate MAP kinase expressing plasmid using T7 RNA polymerase or via chemical synthesis as described herein. Sense and antisense siNA strands (for example 20 uM each) are annealed by incubation in buffer (such as 100 mM potassium acetate, 30 mM HEPES-KOH, pH 7.4, 2 mM magnesium acetate) for 1 minute at 90° C. followed by 1 hour at 37° C., then diluted in lysis buffer (for example 100 mM potassium acetate, 30 mM HEPES-KOH at pH 7.4, 2 mM magnesium acetate). Annealing can be monitored by gel electrophoresis on an agarose gel in TBE buffer and stained with ethidium bromide. The Drosophila lysate is prepared using zero to two-hour-old embryos from Oregon R flies collected on yeasted molasses agar that are dechorionated and lysed. The lysate is centrifuged and the supernatant isolated. The assay comprises a reaction mixture containing 50% lysate [vol/vol], RNA (10-50 pM final concentration), and 10% [vol/vol] lysis buffer containing siNA (10 nM final concentration). The reaction mixture also contains 10 mM creatine phosphate, 10 ug/ml creatine phosphokinase, 100 um GTP, 100 uM UTP, 100 uM CTP, 500 uM ATP, 5 mM DTT, 0.1 U/uL RNasin (Promega), and 100 uM of each amino acid. The final concentration of potassium acetate is adjusted to 100 mM. The reactions are pre-assembled on ice and preincubated at 25° C. for 10 minutes before adding RNA, then incubated at 25° C. for an additional 60 minutes. Reactions are quenched with 4 volumes of 1.25× Passive Lysis Buffer (Promega). Target RNA cleavage is assayed by RT-PCR analysis or other methods known in the art and are compared to control reactions in which siNA is omitted from the reaction.

[0418] Alternately, internally-labeled target RNA for the assay is prepared by in vitro transcription in the presence of [alpha-³²P] CTP, passed over a G50 Sephadex column by spin chromatography and used as target RNA without further purification. Optionally, target RNA is 5′-³²P-end labeled using T4 polynucleotide kinase enzyme. Assays are performed as described above and target RNA and the specific RNA cleavage products generated by RNAi are visualized on an autoradiograph of a gel. The percentage of cleavage is determined by PHOSPHOR IMAGER® (autoradiography) quantitation of bands representing intact control RNA or RNA from control reactions without siNA and the cleavage products generated by the assay.

[0419] In one embodiment, this assay is used to determine target sites in the MAP kinase RNA target for siNA mediated RNAi cleavage, wherein a plurality of siNA constructs are screened for RNAi mediated cleavage of the MAP kinase RNA target, for example, by analyzing the assay reaction by electrophoresis of labeled target RNA, or by northern blotting, as well as by other methodology well known in the art.

### Example 7

### Nucleic Acid Inhibition of MAP Kinase Target RNA

[0420] siNA molecules targeted to the human MAP kinase (e.g., c-JUN, ERK1, ERK2, JNK1, JNK2, and/or p38) RNA are designed and synthesized as described above. These nucleic acid molecules can be tested for cleavage activity in vivo, for example, using the following procedure. The target sequences and the nucleotide location within the MAP kinase (e.g., c-JUN, ERK1, ERK2, JNK1, JNK2, and/or p38) RNA are given in Tables II and III.

[0421] Two formats are used to test the efficacy of siNAs targeting MAP kinase (e.g., c-JUN, ERK1, ERK2, JNK1, JNK2, and/or p38). First, the reagents are tested in cell culture using, for example, cultured human kidney fibroblast cells (e.g., A549, 293, HeLa, or HepG2 cells) to determine the extent of RNA and protein inhibition. siNA reagents (e.g.; see Tables II and III) are selected against the MAP kinase (e.g., c-JUN, ERK1, ERK2, JNK1, JNK2, and/or p38) target as described herein. RNA inhibition is measured after delivery of these reagents by a suitable transfection agent to, for example, A549, 293, HeLa, or HepG2 cells. Relative amounts of target RNA are measured versus actin using real-time PCR monitoring of amplification (eg., ABI 7700 TAQMAN®). A comparison is made to a mixture of oligonucleotide sequences made to unrelated targets or to a randomized siNA control with the same overall length and chemistry, but randomly substituted at each position. Primary and secondary lead reagents are chosen for the target and optimization performed. After an optimal transfection agent concentration is chosen, a RNA time-course of inhibition is performed with the lead siNA molecule. In addition, a cell-plating format can be used to determine RNA inhibition.

### Delivery of siNA to Cells

[0422] Cells such as A549, 293, HeLa, or HepG2 cells are seeded, for example, at 1×10⁵ cells per well of a six-well dish in EGM-2 (BioWhittaker) the day before transfection. siNA (final concentration, for example 20 nM) and cationic lipid (e.g., final concentration 2 μg/ml) are complexed in EGM basal media (Bio Whittaker) at 37° C. for 30 minutes in polystyrene tubes. Following vortexing, the complexed siNA is added to each well and incubated for the times indicated. For initial optimization experiments, cells are seeded, for example, at 1×10³ in 96 well plates and siNA complex added as described. Efficiency of delivery of siNA to cells is determined using a fluorescent siNA complexed with lipid. Cells in 6-well dishes are incubated with siNA for 24 hours, rinsed with PBS and fixed in 2% paraformaldehyde for 15 minutes at room temperature. Uptake of siNA is visualized using a fluorescent microscope.

### TAQMAN® (Real-Time PCR Monitoring of Amplification) and Lightcycler Quantification of mRNA

[0423] Total RNA is prepared from cells following siNA delivery, for example, using Qiagen RNA purification kits for 6-well or Rneasy extraction kits for 96-well assays. For TAQMAN® analysis (real-time PCR monitoring of amplification), dual-labeled probes are synthesized with the reporter dye, FAM or JOE, covalently linked at the 5′-end and the quencher dye TAMRA conjugated to the 3′-end. One-step RT-PCR amplifications are performed on, for example, an ABI PRISM 7700 Sequence Detector using 50 μl reactions consisting of 10 μl total RNA, 100 nM forward primer, 900 nM reverse primer, 100 nM probe, 1× TaqMan PCR reaction buffer (PE-Applied Biosystems), 5.5 mM MgCl₂, 300 mM each dATP, dCTP, dGTP, and dTTP, 10U RNase Inhibitor (Promega), 1.25U AMPLITAQ GOLD® (DNA polymerase) (PE-Applied Biosystems) and 10U M-MLV Reverse Transcriptase (Promega). The thermal cycling conditions can consist of 30 minutes at 48° C., 10 minutes at 95° C., followed by 40 cycles of 15 seconds at 95° C. and 1 minute at 60° C. Quantitation of mRNA levels is determined relative to standards generated from serially diluted total cellular RNA (300, 100, 33, 11 ng/r×n) and normalizing to β-actin or GAPDH mRNA in parallel TAQMAN® reactions (real-time PCR monitoring of amplification). For each gene of interest an upper and lower primer and a fluorescently labeled probe are designed. Real time incorporation of SYBR Green I dye into a specific PCR product can be measured in glass capillary tubes using a lightcyler. A standard curve is generated for each primer pair using control cRNA. Values are represented as relative expression to GAPDH in each sample.

### Western Blotting

[0424] Nuclear extracts can be prepared using a standard micro preparation technique (see for example Andrews and Faller, 1991, Nucleic Acids Research, 19, 2499). Protein extracts from supernatants are prepared, for example using TCA precipitation. An equal volume of 20% TCA is added to the cell supernatant, incubated on ice for 1 hour and pelleted by centrifugation for 5 minutes. Pellets are washed in acetone, dried and resuspended in water. Cellular protein extracts are run on a 10% Bis-Tris NuPage (nuclear extracts) or 4-12% Tris-Glycine (supernatant extracts) polyacrylamide gel and transferred onto nitro-cellulose membranes. Non-specific binding can be blocked by incubation, for example, with 5% non-fat milk for 1 hour followed by primary antibody for 16 hour at 4° C. Following washes, the secondary antibody is applied, for example (1:10,000 dilution) for 1 hour at room temperature and the signal detected with SuperSignal reagent (Pierce).

### Example 8

### Animal Models Useful to Evaluate the Down-Regulation of MAP Kinase Gene Expression

[0425] Evaluating the efficacy of anti-MAP kinase agents in animal models is an important prerequisite to human clinical trials. Various animal models of cancer, inflammatory, autoimmune, neuroligic, ocular, respiratory, allergic, and/or proliferative diseases, conditions, or disorders as are known in the art can be adapted for use for pre-clinical evaluation of the efficacy of nucleic acid compositions of the invention in modulating MAP kinase gene expression toward therapeutic use.

### Cell Culture

[0426] There are numerous cell culture systems that can be used to analyze reduction of MAP kinase levels either directly or indirectly by measuring downstream effects. For example, cultured human kidney fibroblast cells (e.g., 293 cells), HeLa, or HepG2 cells can be used in cell culture experiments to assess the efficacy of nucleic acid molecules of the invention. As such, cells treated with nucleic acid molecules of the invention (e.g., siNA) targeting MAP kinase RNA would be expected to have decreased MAP kinase expression capacity compared to matched control nucleic acid molecules having a scrambled or inactive sequence. In a non-limiting example, 293, HeLa, or HepG2 cells are cultured and MAP kinase expression is quantified, for example by time-resolved immuno fluorometric assay. MAP kinase messenger-RNA expression is quantitated with RT-PCR in cultured cells. Untreated cells are compared to cells treated with siNA molecules transfected with a suitable reagent, for example a cationic lipid such as lipofectamine, and MAP kinase protein and RNA levels are quantitated. Dose response assays are then performed to establish dose dependent inhibition of MAP kinase expression. In another non-limiting example, cell culture experiments are carried out as described by Aguirre et al., 2000, J. Biol. Chem., 275, 9047-9054.

[0427] In several cell culture systems, cationic lipids have been shown to enhance the bioavailability of oligonucleotides to cells in culture (Bennet, et al., 1992, Mol. Pharmacology, 41, 1023-1033). In one embodiment, siNA molecules of the invention are complexed with cationic lipids for cell culture experiments. siNA and cationic lipid mixtures are prepared in serum-free DMEM immediately prior to addition to the cells. DMEM plus additives are warmed to room temperature (about 20-25° C.) and cationic lipid is added to the final desired concentration and the solution is vortexed briefly. siNA molecules are added to the final desired concentration and the solution is again vortexed briefly and incubated for 10 minutes at room temperature. In dose response experiments, the RNA/lipid complex is serially diluted into DMEM following the 10 minute incubation.

### Animal Models

[0428] Evaluating the efficacy of anti-MAP kinase agents in animal models is an important prerequisite to human clinical trials. Obesity and type 2 diabetes are the most prevalent and serious metabolic diseases in that they affect more than 50% of adults in the USA. These conditions are associated with a chronic inflammatory response characterized by abnormal inflammatory cytokine production, increased acute-phase reactants and other stress-induced molecules. Many of these alterations seem to be initiated and to reside within adipose tissue. Elevated production of tumour necrosis factor (TNF)-alpha by adipose tissue decreases sensitivity to insulin and has been detected in several experimental obesity models and obese humans. Free fatty acids (FFAs) are also implicated in the etiology of obesity-induced insulin resistance and diabetes. Because both TNF-alpha and FFAs are potent MAP kinase activators, Hirosumi et al., 2002, Nature, 420, 333-336 determined whether obesity is associated with alterations in stress-activated and inflammatory responses through this pathway and whether MAP kinases are causally linked to aberrant metabolic control in this state. In this study, Hirosumi et al., describe dietary and genetic (ob/ob) mouse models of obesity useful in evaluating MAP kinase gene expression. Such transgenic mice are useful as models for obesity and insulin resistance and can be used to identify nucleic acid molecules of the invention that modulate MAP kinase gene (e.g., ERK1, ERK2, JNK1, JNK2, and/or p38) expression and gene function toward therapeutic use in treating obesity and insulin resistance (e.g. type I and II diabetes).

[0429] The role of c-JUN in liver cancer has recently been investigated (Eferl et al., 2003, Cell, 112, 181). These investigators deleted c-JUN and then induced liver cancer by chemical carcinogenesis. They observed that deletion of c-JUN dramatically interfered with liver tumor formation. Animal survival was markedly worse in c-JUN wildtype animals relative to deletion mutants. In particular, the number of apoptotic cells increased about five fold in tumors in the c-JUN deletion strain relative to the wildtype animals. Importantly, levels of the pro-apoptotic gene products such as p53 and noxa were elevated in the c-JUN deletion strain. c-JUN is likely to antagonize other pro-apoptotic genes such as TNF-a. Thus, by blocking p53 and its large family of dependent genes, c-JUN seems to promote tumor formation. Since a large fraction of chronically infected HCV patients develop hepatocellular carcinoma, c-JUN provides an attractive target for treating HCV infected pateints to prevent or ameliorate hepatocellular carcinoma. The animal model described by Eferl et al., supra, can be used to evaluate siNA molecules of the invention for efficacy in inhibiting c-JUN expression in liver toward therapeutic use in preventing and/or treating hepatocellular carcinoma in human subjects.

[0430] Because mitogen activated protein kinases (MAP kinases) are constituents of numerous signal transduction pathways, and are activated by protein kinase cascades, intense efforts are under way to develop and evaluate compounds that target components of MAPK pathways. Several of these inhibitors are effective in animal models of disease and have advanced to clinical trials for the treatment of inflammatory diseases, metabolic diseases, autoimmune diseases and cancer. The clinical utility of specifically targeting MAP kinase genes (e.g., c-JUN, ERK1, ERK2, JNK1, JNK2, and/or p38) can be studied in animal models and clinical studies of inflammatory diseases, metabolic diseases, autoimmune diseases and cancer (see for example English et al., 2002, Trends in Pharmacological Sciences, 23, 40-45).

### Example 9

### RNAi Mediated Inhibition of p38 (MAPK14) Expression

[0431] siNA constructs (Table III) are tested for efficacy in reducing p38 RNA expression in, for example, A549 cells. Cells are plated approximately 24 hours before transfection in 96-well plates at 5,000-7,500 cells/well, 100 μl/well, such that at the time of transfection cells are 70-90% confluent. For transfection, annealed siNAs are mixed with the transfection reagent (Lipofectamine 2000, Invitrogen) in a volume of 50 μl/well and incubated for 20 minutes at room temperature. The siNA transfection mixtures are added to cells to give a final siNA concentration of 25 nM in a volume of 150 μl. Each siNA transfection mixture is added to 3 wells for triplicate siNA treatments. Cells are incubated at 37° for 24 hours in the continued presence of the siNA transfection mixture. At 24 hours, RNA is prepared from each well of treated cells. The supernatants with the transfection mixtures are first removed and discarded, then the cells are lysed and RNA prepared from each well. Target gene expression following treatment is evaluated by RT-PCR for the target gene and for a control gene (36B4, an RNA polymerase subunit) for normalization. The triplicate data is averaged and the standard deviations determined for each treatment. Normalized data are graphed and the percent reduction of target mRNA by active siNAs in comparison to their respective inverted control siNAs is determined.

[0432] In a non-limiting example, chemically modified siNA constructs (Table III) were tested for efficacy as described above in reducing p38 RNA expression in A549 cells. Active siNAs were evaluated compared to untreated cells, matched chemistry irrelevant controls (IC1, IC2), and a transfection control. Results are summarized in FIG. 23. FIG. 23 shows results for chemically modified siNA constructs targeting various sites in p38 mRNA. As shown in FIG. 23, the active siNA constructs provide significant inhibition of p38 gene expression in cell culture experiments as determined by levels of p38 mRNA when compared to appropriate controls.

### Example 10

### RNAi Mediated Inhibition of JNK1 Expression

[0433] siNA constructs (Table III) are tested for efficacy in reducing JNK1 RNA expression in, for example, A549 cells. Cells are plated approximately 24 hours before transfection in 96-well plates at 5,000-7,500 cells/well, 100 μl/well, such that at the time of transfection cells are 70-90% confluent. For transfection, annealed siNAs are mixed with the transfection reagent (Lipofectamine 2000, Invitrogen) in a volume of 50 μl/well and incubated for 20 minutes at room temperature. The siNA transfection mixtures are added to cells to give a final siNA concentration of 25 nM in a volume of 150 μl. Each siNA transfection mixture is added to 3 wells for triplicate siNA treatments. Cells are incubated at 37° for 24 hours in the continued presence of the siNA transfection mixture. At 24 hours, RNA is prepared from each well of treated cells. The supernatants with the transfection mixtures are first removed and discarded, then the cells are lysed and RNA prepared from each well. Target gene expression following treatment is evaluated by RT-PCR for the target gene and for a control gene (36B4, an RNA polymerase subunit) for normalization. The triplicate data is averaged and the standard deviations determined for each treatment. Normalized data are graphed and the percent reduction of target mRNA by active siNAs in comparison to their respective inverted control siNAs is determined.

[0434] In a non-limiting example, chemically modified siNA constructs (Table III) were tested for efficacy as described above in reducing JNK1 RNA expression in A549 cells. Active siNAs were evaluated compared to untreated cells, matched chemistry irrelevant controls (IC1, IC2), and a transfection control. Results are summarized in FIG. 24. FIG. 24 shows results for chemically modified siNA constructs targeting various sites in JNK1 mRNA. As shown in FIG. 24, the active siNA constructs provide significant inhibition of JNK1 gene expression in cell culture experiments as determined by levels of JNK1 mRNA when compared to appropriate controls.

### Example 11

### RNAi Mediated Inhibition of c-JUN Expression

[0435] siNA constructs (Table III) are tested for efficacy in reducing c-JUN RNA expression in, for example, HEPA1C1C7 cells. Cells are plated approximately 24 hours before transfection in 96-well plates at 5,000-7,500 cells/well, 100 μl/well, such that at the time of transfection cells are 70-90% confluent. For transfection, annealed siNAs are mixed with the transfection reagent (Lipofectamine 2000, Invitrogen) in a volume of 50 μl/well and incubated for 20 minutes at room temperature. The siNA transfection mixtures are added to cells to give a final siNA concentration of 25 nM in a volume of 150 μl. Each siNA transfection mixture is added to 3 wells for triplicate siNA treatments. Cells are incubated at 37° for 24 hours in the continued presence of the siNA transfection mixture. At 24 hours, RNA is prepared from each well of treated cells. The supernatants with the transfection mixtures are first removed and discarded, then the cells are lysed and RNA prepared from each well. Target gene expression following treatment is evaluated by RT-PCR for the target gene and for a control gene (36B4, an RNA polymerase subunit) for normalization. The triplicate data is averaged and the standard deviations determined for each treatment. Normalized data are graphed and the percent reduction of target mRNA by active siNAs in comparison to their respective inverted control siNAs is determined.

[0436] In a non-limiting example, chemically modified siNA constructs (32090/32110; 32330/32332; 32092/32112; 32331/32333; 31824/31832; 32021/32023) (see Table III) were tested for efficacy as described above in reducing c-JUN RNA expression in HEPA1C1C7 cells. Active siNAs were evaluated compared to untreated cells, matched chemistry irrelevant controls (32334/32336; 32335/32337; 31840/31848; 32037/32039) and a transfection control (lipid alone). Results are summarized in FIG. 25. FIG. 25 shows results for chemically modified siNA constructs targeting various sites in c-JUN mRNA. As shown in FIG. 25, the active siNA constructs provide significant inhibition of c-JUN gene expression in cell culture experiments as determined by levels of c-JUN mRNA when compared to appropriate controls.

### Example 12

### RNAi Mediated Inhibition of ERK1 (MAPK 3) Expression

[0437] siNA constructs (Table III) are tested for efficacy in reducing ERK1 RNA expression in, for example, A549 cells. Cells are plated approximately 24 hours before transfection in 96-well plates at 5,000-7,500 cells/well, 100 μl/well, such that at the time of transfection cells are 70-90% confluent. For transfection, annealed siNAs are mixed with the transfection reagent (Lipofectamine 2000, Invitrogen) in a volume of 50 μl/well and incubated for 20 minutes at room temperature. The siNA transfection mixtures are added to cells to give a final siNA concentration of 25 nM in a volume of 150 μl. Each siNA transfection mixture is added to 3 wells for triplicate siNA treatments. Cells are incubated at 37° for 24 hours in the continued presence of the siNA transfection mixture. At 24 hours, RNA is prepared from each well of treated cells. The supernatants with the transfection mixtures are first removed and discarded, then the cells are lysed and RNA prepared from each well. Target gene expression following treatment is evaluated by RT-PCR for the target gene and for a control gene (36B4, an RNA polymerase subunit) for normalization. The triplicate data is averaged and the standard deviations determined for each treatment. Normalized data are graphed and the percent reduction of target mRNA by active siNAs in comparison to their respective inverted control siNAs is determined.

[0438] In a non-limiting example, chemically modified siNA constructs (Table III) were tested for efficacy as described above in reducing ERK1 RNA expression in A549 cells. Active siNAs were evaluated compared to untreated cells, matched chemistry irrelevant controls (IC1, IC2), and a transfection control. Results are summarized in FIG. 26. FIG. 26 shows results for chemically modified siNA constructs targeting various sites in ERK1 mRNA. As shown in FIG. 26, the active siNA constructs provide significant inhibition of ERK1 gene expression in cell culture experiments as determined by levels of ERK1 mRNA when compared to appropriate controls.

### Example 13

### Indications

[0439] The present body of knowledge in MAP kinase research indicates the need for methods and compounds that can regulate MAP kinase gene (e.g., c-JUN, ERK1, ERK2, JNK1, JNK2, and/or p38) product expression for research, diagnostic, and therapeutic use. As described herein, the nucleic acid molecules of the present invention can be used to treat proliferative diseases and conditions and/or cancer including breast cancer, cancers of the head and neck including various lymphomas such as mantle cell lymphoma, non-Hodgkins lymphoma, adenoma, squamous cell carcinoma, laryngeal carcinoma, cancers of the retina, cancers of the esophagus, multiple myeloma, ovarian cancer, uterine cancer, melanoma, colorectal cancer, lung cancer, bladder cancer, prostate cancer, glioblastoma, lung cancer (including non-small cell lung carcinoma), pancreatic cancer, cervical cancer, head and neck cancer, skin cancers, nasopharyngeal carcinoma, liposarcoma, epithelial carcinoma, renal cell carcinoma, gallbladder adeno carcinoma, parotid adenocarcinoma, endometrial sarcoma, multidrug resistant cancers; and proliferative diseases and conditions, such as neovascularization associated with tumor angiogenesis, macular degeneration (e.g., wet/dry AMD), corneal neovascularization, diabetic retinopathy, neovascular glaucoma, myopic degeneration and other proliferative diseases and conditions such as restenosis and polycystic kidney disease,; inflammatory diseases and conditions such as inflammation, acute inflammation, chronic inflammation, atherosclerosis, restenosis, asthma, allergic rhinitis, atopic dermatitis, septic shock, rheumatoid arthritis, inflammatory bowl disease, inflammotory pelvic disease, pain, ocular inflammatory disease, celiac disease, deep dermal burn, Leigh Syndrome, Glycerol Kinase Deficiency, Familial eosinophilia (FE), autosomal recessive spastic ataxia, laryngeal inflammatory disease; Tuberculosis, Chronic cholecystitis, Bronchiectasis, Silicosis and other pneumoconioses; autoimmune diseases and conditions such as multiple sclerosis, diabetes mellitus, lupus, celiac disease, Crohn's disease, ulcerative colitis, Guillain-Barre syndrome, scleroderms, Goodpasture's syndrome, Wegener's granulomatosis, autoimmune epilepsy, Rasmussen's encephalitis, Primary biliary sclerosis, Sclerosing cholangitis, Autoimmune hepatitis Addison's disease, Hashimoto's thyroiditis, fibromyalgia, Menier's syndrome; and transplantation rejection (e.g., prevention of allograft rejection) and any other any other disease that responds to modulation of MAP kinase expression.

[0440] The use of radiation treatments and chemotherapeutics such as Gemcytabine and cyclophosphamide are also non-limiting examples of chemotherapeutic agents that can also be combined with or used in conjunction with the nucleic acid molecules (e.g. siNA molecules) of the instant invention for oncology therapeutic applications. Those skilled in the art will recognize that other anti-cancer compounds and therapies can be similarly be readily combined with the nucleic acid molecules of the instant invention (e.g. siNA molecules) and are hence within the scope of the instant invention. Such compounds and therapies are well known in the art (see for example Cancer: Principles and Practice of Oncology, Volumes 1 and 2, eds Devita, V. T., Hellman, S., and Rosenberg, S. A., J. B. Lippincott Company, Philadelphia, USA; incorporated herein by reference) and include, without limitations, folates, antifolates, pyrimidine analogs, fluoropyrimidines, purine analogs, adenosine analogs, topoisomerase I inhibitors, anthrapyrazoles, retinoids, antibiotics, anthacyclins, platinum analogs, alkylating agents, nitrosoureas, plant derived compounds such as vinca alkaloids, epipodophyllotoxins, tyrosine kinase inhibitors, taxols, radiation therapy, surgery, nutritional supplements, gene therapy, radiotherapy, for example 3D-CRT, immunotoxin therapy, for example ricin, and monoclonal antibodies. Specific examples of chemotherapeutic compounds that can be combined with or used in conjunction with the nucleic acid molecules of the invention include, but are not limited to, Paclitaxel; Docetaxel; Methotrexate; Doxorubin; Edatrexate; Vinorelbine; Tamoxifen; Leucovorin; 5-fluoro uridine (5-FU); lonotecan; Cisplatin; Carboplatin; Amsacrine; Cytarabine; Bleomycin; Mitomycin C; Dactinomycin; Mithramycin; Hexamethylmelamine; Dacarbazine; L-asperginase; Nitrogen mustard; Melphalan, Chlorambucil; Busulfan; Ifosfamide; 4-hydroperoxycyclophosphamide, Thiotepa; Irinotecan (CAMPTOSAR®, CPT-11, Camptothecin-1, Campto) Tamoxifen, Herceptin; IMC C225; ABX-EGF: and combinations thereof are non-limiting examples of compounds and/or methods that can be combined with or used in conjunction with the nucleic acid molecules (e.g. siNA) of the instant invention. Troglitazone, insulin, and PTP-1B modulators are non-limiting examples of pharmaceutical agents that can be combined with or used in conjunction with the nucleic acid molecules (e.g. siNA molecules) of the instant invention for treating obesity and diabetes. In addition, treatment of HCV infected subjects with siNA molecules of the invention targeting c-JUN or other MAP kinases involved in the maintenance or development of hepatocellular carcinoma can be combined with anti-viral compounds, such as siNA molecules targeting HCV RNA or other antiviral compounds known in the art (e.g., interferons, nucleoside analogs etc.). Those skilled in the art will recognize that other drug compounds and therapies can be similarly be readily combined with the nucleic acid molecules of the instant invention (e.g., siNA molecules) are hence within the scope of the instant invention.

### Example 14

### Diagnostic Uses

[0441] The siNA molecules of the invention can be used in a variety of diagnostic applications, such as in the identification of molecular targets (e.g., RNA) in a variety of applications, for example, in clinical, industrial, environmental, agricultural and/or research settings. Such diagnostic use of siNA molecules involves utilizing reconstituted RNAi systems, for example, using cellular lysates or partially purified cellular lysates. siNA molecules of this invention can be used as diagnostic tools to examine genetic drift and mutations within diseased cells or to detect the presence of endogenous or exogenous, for example viral, RNA in a cell. The close relationship between siNA activity and the structure of the target RNA allows the detection of mutations in any region of the molecule, which alters the base-pairing and three-dimensional structure of the target RNA. By using multiple siNA molecules described in this invention, one can map nucleotide changes, which are important to RNA structure and function in vitro, as well as in cells and tissues. Cleavage of target RNAs with siNA molecules can be used to inhibit gene expression and define the role of specified gene products in the progression of disease or infection. In this manner, other genetic targets can be defined as important mediators of the disease. These experiments will lead to better treatment of the disease progression by affording the possibility of combination therapies (e.g., multiple siNA molecules targeted to different genes, siNA molecules coupled with known small molecule inhibitors, or intermittent treatment with combinations siNA molecules and/or other chemical or biological molecules). Other in vitro uses of siNA molecules of this invention are well known in the art, and include detection of the presence of mRNAs associated with a disease, infection, or related condition. Such RNA is detected by determining the presence of a cleavage product after treatment with a siNA using standard methodologies, for example, fluorescence resonance emission transfer (FRET).

[0442] In a specific example, siNA molecules that cleave only wild-type or mutant forms of the target RNA are used for the assay. The first siNA molecules (i.e., those that cleave only wild-type forms of target RNA) are used to identify wild-type RNA present in the sample and the second siNA molecules (i.e., those that cleave only mutant forms of target RNA) are used to identify mutant RNA in the sample. As reaction controls, synthetic substrates of both wild-type and mutant RNA are cleaved by both siNA molecules to demonstrate the relative siNA efficiencies in the reactions and the absence of cleavage of the “non-targeted” RNA species. The cleavage products from the synthetic substrates also serve to generate size markers for the analysis of wild-type and mutant RNAs in the sample population. Thus, each analysis requires two siNA molecules, two substrates and one unknown sample, which is combined into six reactions. The presence of cleavage products is determined using an RNase protection assay so that full-length and cleavage fragments of each RNA can be analyzed in one lane of a polyacrylamide gel. It is not absolutely required to quantify the results to gain insight into the expression of mutant RNAs and putative risk of the desired phenotypic changes in target cells. The expression of mRNA whose protein product is implicated in the development of the phenotype (i.e., disease related or infection related) is adequate to establish risk. If probes of comparable specific activity are used for both transcripts, then a qualitative comparison of RNA levels is adequate and decreases the cost of the initial diagnosis. Higher mutant form to wild-type ratios are correlated with higher risk whether RNA levels are compared qualitatively or quantitatively.

[0443] All patents and publications mentioned in the specification are indicative of the levels of skill of those skilled in the art to which the invention pertains. All references cited in this disclosure are incorporated by reference to the same extent as if each reference had been incorporated by reference in its entirety individually.

[0444] One skilled in the art would readily appreciate that the present invention is well adapted to carry out the objects and obtain the ends and advantages mentioned, as well as those inherent therein. The methods and compositions described herein as presently representative of preferred embodiments are exemplary and are not intended as limitations on the scope of the invention. Changes therein and other uses will occur to those skilled in the art, which are encompassed within the spirit of the invention, are defined by the scope of the claims.

[0445] It will be readily apparent to one skilled in the art that varying substitutions and modifications can be made to the invention disclosed herein without departing from the scope and spirit of the invention. Thus, such additional embodiments are within the scope of the present invention and the following claims. The present invention teaches one skilled in the art to test various combinations and/or substitutions of chemical modifications described herein toward generating nucleic acid constructs with improved activity for mediating RNAi activity. Such improved activity can comprise improved stability, improved bioavailability, and/or improved activation of cellular responses mediating RNAi. Therefore, the specific embodiments described herein are not limiting and one skilled in the art can readily appreciate that specific combinations of the modifications described herein can be tested without undue experimentation toward identifying siNA molecules with improved RNAi activity.

[0446] The invention illustratively described herein suitably can be practiced in the absence of any element or elements, limitation or limitations that are not specifically disclosed herein. The terms and expressions which have been employed are used as terms of description and not of limitation, and there is no intention that in the use of such terms and expressions of excluding any equivalents of the features shown and described or portions thereof, but it is recognized that various modifications are possible within the scope of the invention claimed. Thus, it should be understood that although the present invention has been specifically disclosed by preferred embodiments, optional features, modification and variation of the concepts herein disclosed may be resorted to by those skilled in the art, and that such modifications and variations are considered to be within the scope of this invention as defined by the description and the appended claims.

[0447] In addition, where features or aspects of the invention are described in terms of Markush groups or other grouping of alternatives, those skilled in the art will recognize that the invention is also thereby described in terms of any individual member or subgroup of members of the Markush group or other group.

TABLE I
MAP kinase Accession Numbers

| | |
|---|---|
| NM_002745 | Homo sapiens mitogen-activated protein kinase 1 (MAPK1), transcript variant 1, mRNA. |
| NM_138957 | Homo sapiens mitogen-activated protein kinase 1 (MAPK1), transcript variant 2, mRNA. |
| X60188 | Human ERK1 mRNA for protein serine/threonine kinase (MAPK3). |
| XM_055766 | Homo sapiens mitogen-activated protein kinase 3 (MAPK3), mRNA |
| NM_002747 | Homo sapiens mitogen-activated protein kinase 4 (MAPK4), mRNA |
| XM_165662 | Homo sapiens Mitogen-activated protein kinase 4 (Extracellular signal-regulated |
| | kinase 4) (ERK-4) (MAP kinase isoform p63) (p63-MAPK) (LOC220131), mRNA |
| NM_002748 | Homo sapiens mitogen-activated protein kinase 6 (MAPK6), mRNA. |
| XM_166057 | Homo sapiens Mitogen-activated protein kinase 6 (Extracellular signal-regulated |
| | kinase 3) (ERK-3) (MAP kinase isoform p97) (p97-MAPK) (LOC220839), mRNA |
| XM_035575 | Homo sapiens mitogen-activated protein kinase 6 (MAPK6), mRNA |
| NM_139033 | Homo sapiens mitogen-activated protein kinase 7 (MAPK7), transcript variant 1, mRNA |
| NM_139032 | Homo sapiens mitogen-activated protein kinase 7 (MAPK7), transcript variant 2, mRNA |
| NM_002749 | Homo sapiens mitogen-activated protein kinase 7 (MAPK7), transcript variant 3, mRNA |
| NM_139034 | Homo sapiens mitogen-activated protein kinase 7 (MAPK7), transcript variant 4, mRNA |
| NM_139049 | Homo sapiens mitogen-activated protein kinase 8 (MAPK8), transcript variant 1, mRNA. |
| NM_002750 | Homo sapiens mitogen-activated protein kinase 8 (MAPK8), transcript variant 2, mRNA. |
| NM_139046 | Homo sapiens mitogen-activated protein kinase 8 (MAPK8), transcript variant 3, mRNA. |
| NM_139047 | Homo sapiens mitogen-activated protein kinase 8 (MAPK8), transcript variant 4, mRNA. |
| NM_002752 | Homo sapiens mitogen-activated protein kinase 9 (MAPK9), transcript variant 1, mRNA. |
| NM_139068 | Homo sapiens mitogen-activated protein kinase 9 (MAPK9), transcript variant 2, mRNA. |
| NM_139069 | Homo sapiens mitogen-activated protein kinase 9 (MAPK9), transcript variant 3, mRNA. |
| NM_139070 | Homo sapiens mitogen-activated protein kinase 9 (MAPK9), transcript variant 4, mRNA. |
| NM_002753 | Homo sapiens mitogen-activated protein kinase 10 (MAPK10), transcript variant 1, mRNA |
| NM_138982 | Homo sapiens mitogen-activated protein kinase 10 (MAPK10), transcript variant 2, mRNA |
| NM_138980 | Homo sapiens mitogen-activated protein kinase 10 (MAPK10), transcript variant 3, mRNA |
| NM_138981 | Homo sapiens mitogen-activated protein kinase 10 (MAPK10), transcript variant 4, mRNA |
| NM_002751 | Homo sapiens mitogen-activated protein kinase 11 (MAPK11), transcript variant 1, mRNA. |
| NM_138993 | Homo sapiens mitogen-activated protein kinase 11 (MAPK11), transcript variant 2, mRNA. |
| NM_002969 | Homo sapiens mitogen-activated protein kinase 12 (MAPK12), mRNA. |
| NM_002754 | Homo sapiens mitogen-activated protein kinase 13 (MAPK13), mRNA. |
| NM_001315 | Homo sapiens mitogen-activated protein kinase 14 (MAPK14), transcript variant 1, mRNA. |
| NM_139012 | Homo sapiens mitogen-activated protein kinase 14 (MAPK14), transcript variant 2, mRNA. |
| NM_139013 | Homo sapiens mitogen-activated protein kinase 14 (MAPK14), transcript variant 3, mRNA. |
| NM_139014 | Homo sapiens mitogen-activated protein kinase 14 (MAPK14), transcript variant 4, mRNA. |
| NM_002755 | Homo sapiens mitogen-activated protein kinase kinase 1 (MAP2K1), mRNA |
| NM_030662 | Homo sapiens mitogen-activated protein kinase kinase 2 (MAP2K2), mRNA |
| NM_002756 | Homo sapiens mitogen-activated protein kinase kinase 3 (MAP2K3), transcript variant A, mRNA |
| NM_145109 | Homo sapiens mitogen-activated protein kinase kinase 3 (MAP2K3), transcript variant B, mRNA |
| NM_145110 | Homo sapiens mitogen-activated protein kinase kinase 3 (MAP2K3), transcript variant C, mRNA |
| XM_008654 | Homo sapiens mitogen-activated protein kinase kinase 4 (MAP2K4), mRNA |
| NM_003010 | Homo sapiens mitogen-activated protein kinase kinase 4 (MAP2K4), mRNA |
| NM_145160 | Homo sapiens mitogen-activated protein kinase kinase 5 (MAP2K5), transcript variant A, mRNA |
| NM_002757 | Homo sapiens mitogen-activated protein kinase kinase 5 (MAP2K5), transcript variant B, mRNA |
| NM_145161 | Homo sapiens mitogen-activated protein kinase kinase 5 (MAP2K5), transcript variant C, mRNA |
| NM_145162 | Homo sapiens mitogen-activated protein kinase kinase 5 (MAP2K5), transcript variant D, mRNA |
| XM_113313 | Homo sapiens mitogen-activated protein kinase kinase 6 (MAP2K6), mRNA |
| NM_002758 | Homo sapiens mitogen-activated protein kinase kinase 6 (MAP2K6), transcript variant 1, mRNA |
| NM_031988 | Homo sapiens mitogen-activated protein kinase kinase 6 (MAP2K6), transcript variant 2, mRNA |
| NM_005043 | Homo sapiens mitogen-activated protein kinase kinase 7 (MAP2K7), transcript variant A, mRNA |
| NM_145185 | Homo sapiens mitogen-activated protein kinase kinase 7 (MAP2K7), transcript variant B, mRNA |
| NM_145329 | Homo sapiens mitogen-activated protein kinase kinase 7 (MAP2K7), transcript variant C, mRNA |
| AF042838 | Homo sapiens mitogen-activated protein kinase kinase kinase 1 (MAP3K1), mRNA |
| NM_006609 | Homo sapiens mitogen-activated protein kinase kinase kinase 2 (MAP3K2), mRNA |
| NM_002401 | Homo sapiens mitogen-activated protein kinase kinase kinase 3 (MAP3K3), mRNA |
| NM_005922 | Homo sapiens mitogen-activated protein kinase kinase kinase 4 (MAP3K4), transcript variant 1, mRNA |
| NM_006724 | Homo sapiens mitogen-activated protein kinase kinase kinase 4 (MAP3K4), transcript variant 2, mRNA |
| NM_005923 | Homo sapiens mitogen-activated protein kinase kinase kinase 5 (MAP3K5), mRNA |
| NM_004672 | Homo sapiens mitogen-activated protein kinase kinase kinase 6 (MAP3K6), mRNA |
| NM_003188 | Homo sapiens mitogen-activated protein kinase kinase kinase 7 (MAP3K7), mRNA |
| NM_005204 | Homo sapiens mitogen-activated protein kinase kinase kinase 8 (MAP3K8), mRNA |
| AF251442 | Homo sapiens mitogen-activated protein kinase kinase kinase 9 (MAP3K9), mRNA |
| NM_002446 | Homo sapiens mitogen-activated protein kinase kinase kinase 10 (MAP3K10), mRNA |
| NM_002419 | Homo sapiens mitogen-activated protein kinase kinase kinase 11 (MAP3K11), mRNA |
| NM_006301 | Homo sapiens mitogen-activated protein kinase kinase kinase 12 (MAP3K12), mRNA |
| NM_004721 | Homo sapiens mitogen-activated protein kinase kinase kinase 13 (MAP3K13), mRNA |
| NM_003954 | Homo sapiens mitogen-activated protein kinase kinase kinase 14 (MAP3K14), mRNA |
| NM_007181 | Homo sapiens mitogen-activated protein kinase kinase kinase kinase 1 (MAP4K1), mRNA |
| NM_004579 | Homo sapiens mitogen-activated protein kinase kinase kinase kinase 2 (MAP4K2), mRNA |
| NM_003618 | Homo sapiens mitogen-activated protein kinase kinase kinase kinase 3 (MAP4K3), mRNA |
| NM_004834 | Homo sapiens mitogen-activated protein kinase kinase kinase kinase 4 (MAP4K4), mRNA |
| NM_006575 | Homo sapiens mitogen-activated protein kinase kinase kinase kinase 5 (MAP4K5), mRNA |
| NM_003668 | Homo sapiens mitogen-activated protein kinase-activated protein kinase 5 (MAPKAPK5), transcript variant 1, mRNA |
| NM_139078 | Homo sapiens mitogen-activated protein kinase-activated protein kinase 5 (MAPKAPK5), transcript variant 2, mRNA |
| NM_004635 | Homo sapiens mitogen-activated protein kinase-activated protein kinase 3 (MAPKAPK3), mRNA |
| NM_004759 | Homo sapiens mitogen-activated protein kinase-activated protein kinase 2 (MAPKAPK2), transcript variant 1, mRNA |
| NM_032960 | Homo sapiens mitogen-activated protein kinase-activated protein kinase 2 (MAPKAPK2), transcript variant 2, mRNA |
| NM_005373 | Homo sapiens myeloproliferative leukemia virus oncogene (MPL), mRNA |
| NM_016848 | Homo sapiens neuronal Shc (SHC3), mRNA |
| NM_002649 | Homo sapiens phosphoinositide-3-kinase, catalytic, gamma polypeptide (PIK3CG), mRNA |
| NM_021003 | Homo sapiens protein phosphatase 1A (formerly 2C), magnesium-dependent, alpha isoform (PPM1A), mRNA |
| NM_003942 | Homo sapiens ribosomal protein S6 kinase, 90 kD, polypeptide 4 (RPS6KA4), mRNA |
| NM_004755 | Homo sapiens ribosomal protein S6 kinase, 90 kD, polypeptide 5 (RPS6KA5), mRNA |
| NM_002228 | Homo sapiens v-jun sarcoma virus 17 oncogene homolog (avian) (JUN), mRNA |

TABLE II
MAP kinase siNA and Target Sequences

| | | | | | | | | |
|---|---|---|---|---|---|---|---|---|
| | | Seq | | | Seq | | | Seq |
| Pos | Target Sequence | ID | UPos | Upper seq | ID | LPos | Lower seq | ID |

MAPK1 NM_002745.2

| | | | | | | | | |
|---|---|---|---|---|---|---|---|---|
| 3 | CCCUCCCUCCGCCCGCCCG | 1 | 3 | CCCUCCCUCCGCCCGCCCG | 1 | 21 | CGGGCGGGCGGAGGGAGGG | 164 |
| 21 | GCCGGCCCGCCCGUCAGUC | 2 | 21 | GCCGGCCCGCCCGUCAGUC | 2 | 39 | GACUGACGGGCGGGCCGGC | 165 |
| 39 | CUGGCAGGCAGGCAGGCAA | 3 | 39 | CUGGCAGGCAGGCAGGCAA | 3 | 57 | UUGCCUGCCUGCCUGCCAG | 166 |
| 57 | AUCGGUCCGAGUGGCUGUC | 4 | 57 | AUCGGUCCGAGUGGCUGUC | 4 | 75 | GACAGCCACUCGGACCGAU | 167 |
| 75 | CGGCUCUUCAGCUCUCCCG | 5 | 75 | CGGCUCUUCAGCUCUCCCG | 5 | 93 | CGGGAGAGCUGAAGAGCCG | 168 |
| 93 | GCUCGGCGUCUUCCUUCCU | 6 | 93 | GCUCGGCGUCUUCCUUCCU | 6 | 111 | AGGAAGGAAGACGCCGAGC | 169 |
| 111 | UCCUCCCGGUCAGCGUCGG | 7 | 111 | UCCUCCCGGUCAGCGUCGG | 7 | 129 | CCGACGCUGACCGGGAGGA | 170 |
| 129 | GCGGCUGCACCGGCGGCGG | 8 | 129 | GCGGCUGCACCGGCGGCGG | 8 | 147 | CCGCCGCCGGUGCAGCCGC | 171 |
| 147 | GCGCAGUCCCUGCGGGAGG | 9 | 147 | GCGCAGUCCCUGCGGGAGG | 9 | 165 | CCUCCCGCAGGGACUGCGC | 172 |
| 165 | GGGCGACAAGAGCUGAGCG | 10 | 165 | GGGCGACAAGAGCUGAGCG | 10 | 183 | CGCUCAGCUCUUGUCGCCC | 173 |
| 183 | GGCGGCCGCCGAGCGUCGA | 11 | 183 | GGCGGCCGCCGAGCGUCGA | 11 | 201 | UCGACGCUCGGCGGCCGCC | 174 |
| 201 | AGCUCAGCGCGGCGGAGGC | 12 | 201 | AGCUCAGCGCGGCGGAGGC | 12 | 219 | GCCUCCGCCGCGCUGAGCU | 175 |
| 219 | CGGCGGCGGCCCGGCAGCC | 13 | 219 | CGGCGGCGGCCCGGCAGCC | 13 | 237 | GGCUGCCGGGCCGCCGCCG | 176 |
| 237 | CAACAUGGCGGCGGCGGCG | 14 | 237 | CAACAUGGCGGCGGCGGCG | 14 | 255 | CGCCGCCGCCGCCAUGUUG | 177 |
| 255 | GGCGGCGGGCGCGGGCCCG | 15 | 255 | GGCGGCGGGCGCGGGCCCG | 15 | 273 | CGGGCCCGCGCCCGCCGCC | 178 |
| 273 | GGAGAUGGUCCGCGGGCAG | 16 | 273 | GGAGAUGGUCCGCGGGCAG | 16 | 291 | CUGCCCGCGGACCAUCUCC | 179 |
| 291 | GGUGUUCGACGUGGGGCCG | 17 | 291 | GGUGUUCGACGUGGGGCCG | 17 | 309 | CGGCCCCACGUCGAACACC | 180 |
| 309 | GCGCUACACCAACCUCUCG | 18 | 309 | GCGCUACACCAACCUCUCG | 18 | 327 | CGAGAGGUUGGUGUAGCGC | 181 |
| 327 | GUACAUCGGCGAGGGCGCC | 19 | 327 | GUACAUCGGCGAGGGCGCC | 19 | 345 | GGCGCCCUCGCCGAUGUAC | 182 |
| 345 | CUACGGCAUGGUGUGCUCU | 20 | 345 | CUACGGCAUGGUGUGCUCU | 20 | 363 | AGAGCACACCAUGCCGUAG | 183 |
| 363 | UGCUUAUGAUAAUGUCAAC | 21 | 363 | UGCUUAUGAUAAUGUCAAC | 21 | 381 | GUUGACAUUAUCAUAAGCA | 184 |
| 381 | CAAAGUUCGAGUAGCUAUC | 22 | 381 | CAAAGUUCGAGUAGCUAUC | 22 | 399 | GAUAGCUACUCGAACUUUG | 185 |
| 399 | CAAGAAAAUCAGCCCCUUU | 23 | 399 | CAAGAAAAUCAGCCCCUUU | 23 | 417 | AAAGGGGCUGAUUUUCUUG | 186 |
| 417 | UGAGCACCAGACCUACUGC | 24 | 417 | UGAGCACCAGACCUACUGC | 24 | 435 | GCAGUAGGUCUGGUGCUCA | 187 |
| 435 | CCAGAGAACCCUGAGGGAG | 25 | 435 | CCAGAGAACCCUGAGGGAG | 25 | 453 | CUCCCUCAGGGUUCUCUGG | 188 |
| 453 | GAUAAAAAUCUUACUGCGC | 26 | 453 | GAUAAAAAUCUUACUGCGC | 26 | 471 | GCGCAGUAAGAUUUUUAUC | 189 |
| 471 | CUUCAGACAUGAGAACAUC | 27 | 471 | CUUCAGACAUGAGAACAUC | 27 | 489 | GAUGUUCUCAUGUCUGAAG | 190 |
| 489 | CAUUGGAAUCAAUGACAUU | 28 | 489 | CAUUGGAAUCAAUGACAUU | 28 | 507 | AAUGUCAUUGAUUCCAAUG | 191 |
| 507 | UAUUCGAGCACCAACCAUC | 29 | 507 | UAUUCGAGCACCAACCAUC | 29 | 525 | GAUGGUUGGUGCUCGAAUA | 192 |
| 525 | CGAGCAAAUGAAAGAUGUA | 30 | 525 | CGAGCAAAUGAAAGAUGUA | 30 | 543 | UACAUCUUUCAUUUGCUCG | 193 |
| 543 | AUAUAUAGUACAGGACCUC | 31 | 543 | AUAUAUAGUACAGGACCUC | 31 | 561 | GAGGUCCUGUACUAUAUAU | 194 |
| 561 | CAUGGAAACAGAUCUUUAC | 32 | 561 | CAUGGAAACAGAUCUUUAC | 32 | 579 | GUAAAGAUCUGUUUCCAUG | 195 |
| 579 | CAAGCUCUUGAAGACACAA | 33 | 579 | CAAGCUCUUGAAGACACAA | 33 | 597 | UUGUGUCUUCAAGAGCUUG | 196 |
| 597 | ACACCUCAGCAAUGACCAU | 34 | 597 | ACACCUCAGCAAUGACCAU | 34 | 615 | AUGGUCAUUGCUGAGGUGU | 197 |
| 615 | UAUCUGCUAUUUUCUCUAC | 35 | 615 | UAUCUGCUAUUUUCUCUAC | 35 | 633 | GUAGAGAAAAUAGCAGAUA | 198 |
| 633 | CCAGAUCCUCAGAGGGUUA | 36 | 633 | CCAGAUCCUCAGAGGGUUA | 36 | 651 | UAACCCUCUGAGGAUCUGG | 199 |
| 651 | AAAAUAUAUCCAUUCAGCU | 37 | 651 | AAAAUAUAUCCAUUCAGCU | 37 | 669 | AGCUGAAUGGAUAUAUUUU | 200 |
| 669 | UAACGUUCUGCACCGUGAC | 38 | 669 | UAACGUUCUGCACCGUGAC | 38 | 687 | GUCACGGUGCAGAACGUUA | 201 |
| 687 | CCUCAAGCCUUCCAACCUG | 39 | 687 | CCUCAAGCCUUCCAACCUG | 39 | 705 | CAGGUUGGAAGGCUUGAGG | 202 |
| 705 | GCUGCUCAACACCACCUGU | 40 | 705 | GCUGCUCAACACCACCUGU | 40 | 723 | ACAGGUGGUGUUGAGCAGC | 203 |
| 723 | UGAUCUCAAGAUCUGUGAC | 41 | 723 | UGAUCUCAAGAUCUGUGAC | 41 | 741 | GUCACAGAUCUUGAGAUCA | 204 |
| 741 | CUUUGGCCUGGCCCGUGUU | 42 | 741 | CUUUGGCCUGGCCCGUGUU | 42 | 759 | AACACGGGCCAGGCCAAAG | 205 |
| 759 | UGCAGAUCCAGACCAUGAU | 43 | 759 | UGCAGAUCCAGACCAUGAU | 43 | 777 | AUCAUGGUCUGGAUCUGCA | 206 |
| 777 | UCACACAGGGUUCCUGACA | 44 | 777 | UCACACAGGGUUCCUGACA | 44 | 795 | UGUCAGGAACCCUGUGUGA | 207 |
| 795 | AGAAUAUGUGGCCACACGU | 45 | 795 | AGAAUAUGUGGCCACACGU | 45 | 813 | ACGUGUGGCCACAUAUUCU | 208 |
| 813 | UUGGUACAGGGCUCCAGAA | 46 | 813 | UUGGUACAGGGCUCCAGAA | 46 | 831 | UUCUGGAGCCCUGUACCAA | 209 |
| 831 | AAUUAUGUUGAAUUCCAAG | 47 | 831 | AAUUAUGUUGAAUUCCAAG | 47 | 849 | CUUGGAAUUCAACAUAAUU | 210 |
| 849 | GGGCUACACCAAGUCCAUU | 48 | 849 | GGGCUACACCAAGUCCAUU | 48 | 867 | AAUGGACUUGGUGUAGCCC | 211 |
| 867 | UGAUAUUUGGUCUGUAGGC | 49 | 867 | UGAUAUUUGGUCUGUAGGC | 49 | 885 | GCCUACAGACCAAAUAUCA | 212 |
| 885 | CUGCAUUCUGGCAGAAAUG | 50 | 885 | CUGCAUUCUGGCAGAAAUG | 50 | 903 | CAUUUCUGCCAGAAUGCAG | 213 |
| 903 | GCUUUCUAACAGGCCCAUC | 51 | 903 | GCUUUCUAACAGGCCCAUC | 51 | 921 | GAUGGGCCUGUUAGAAAGC | 214 |
| 921 | CUUUCCAGGGAAGCAUUAU | 52 | 921 | CUUUCCAGGGAAGCAUUAU | 52 | 939 | AUAAUGCUUCCCUGGAAAG | 215 |
| 939 | UCUUGACCAGCUGAAACAC | 53 | 939 | UCUUGACCAGCUGAAACAC | 53 | 957 | GUGUUUCAGCUGGUCAAGA | 216 |
| 957 | CAUUUUGGGUAUUCUUGGA | 54 | 957 | CAUUUUGGGUAUUCUUGGA | 54 | 975 | UCCAAGAAUACCCAAAAUG | 217 |
| 975 | AUCCCCAUCACAAGAAGAC | 55 | 975 | AUCCCCAUCACAAGAAGAC | 55 | 993 | GUCUUCUUGUGAUGGGGAU | 218 |
| 993 | CCUGAAUUGUAUAAUAAAU | 56 | 993 | CCUGAAUUGUAUAAUAAAU | 56 | 1011 | AUUUAUUAUACAAUUCAGG | 219 |
| 1011 | UUUAAAAGCUAGGAACUAU | 57 | 1011 | UUUAAAAGCUAGGAACUAU | 57 | 1029 | AUAGUUCCUAGCUUUUAAA | 220 |
| 1029 | UUUGCUUUCUCUUCCACAC | 58 | 1029 | UUUGCUUUCUCUUCCACAC | 58 | 1047 | GUGUGGAAGAGAAAGCAAA | 221 |
| 1047 | CAAAAAUAAGGUGCCAUGG | 59 | 1047 | CAAAAAUAAGGUGCCAUGG | 59 | 1065 | CCAUGGCACCUUAUUUUUG | 222 |
| 1065 | GAACAGGCUGUUCCCAAAU | 60 | 1065 | GAACAGGCUGUUCCCAAAU | 60 | 1083 | AUUUGGGAACAGCCUGUUC | 223 |
| 1083 | UGCUGACUCCAAAGCUCUG | 61 | 1083 | UGCUGACUCCAAAGCUCUG | 61 | 1101 | CAGAGCUUUGGAGUCAGCA | 224 |
| 1101 | GGACUUAUUGGACAAAAUG | 62 | 1101 | GGACUUAUUGGACAAAAUG | 62 | 1119 | CAUUUUGUCCAAUAAGUCC | 225 |
| 1119 | GUUGACAUUCAACCCACAC | 63 | 1119 | GUUGACAUUCAACCCACAC | 63 | 1137 | GUGUGGGUUGAAUGUCAAC | 226 |
| 1137 | CAAGAGGAUUGAAGUAGAA | 64 | 1137 | CAAGAGGAUUGAAGUAGAA | 64 | 1155 | UUCUACUUCAAUCCUCUUG | 227 |
| 1155 | ACAGGCUCUGGCCCACCCA | 65 | 1155 | ACAGGCUCUGGCCCACCCA | 65 | 1173 | UGGGUGGGCCAGAGCCUGU | 228 |
| 1173 | AUAUCUGGAGCAGUAUUAC | 66 | 1173 | AUAUCUGGAGCAGUAUUAC | 66 | 1191 | GUAAUACUGCUCCAGAUAU | 229 |
| 1191 | CGACCCGAGUGACGAGCCC | 67 | 1191 | CGACCCGAGUGACGAGCCC | 67 | 1209 | GGGCUCGUCACUCGGGUCG | 230 |
| 1209 | CAUCGCCGAAGCACCAUUC | 68 | 1209 | CAUCGCCGAAGCACCAUUC | 68 | 1227 | GAAUGGUGCUUCGGCGAUG | 231 |
| 1227 | CAAGUUCGACAUGGAAUUG | 69 | 1227 | CAAGUUCGACAUGGAAUUG | 69 | 1245 | CAAUUCCAUGUCGAACUUG | 232 |
| 1245 | GGAUGACUUGCCUAAGGAA | 70 | 1245 | GGAUGACUUGCCUAAGGAA | 70 | 1263 | UUCCUUAGGCAAGUCAUCC | 233 |
| 1263 | AAAGCUCAAAGAACUAAUU | 71 | 1263 | AAAGCUCAAAGAACUAAUU | 71 | 1281 | AAUUAGUUCUUUGAGCUUU | 234 |
| 1281 | UUUUGAAGAGACUGCUAGA | 72 | 1281 | UUUUGAAGAGACUGCUAGA | 72 | 1299 | UCUAGCAGUCUCUUCAAAA | 235 |
| 1299 | AUUCCAGCCAGGAUACAGA | 73 | 1299 | AUUCCAGCCAGGAUACAGA | 73 | 1317 | UCUGUAUCCUGGCUGGAAU | 236 |
| 1317 | AUCUUAAAUUUGUCAGGAC | 74 | 1317 | AUCUUAAAUUUGUCAGGAC | 74 | 1335 | GUCCUGACAAAUUUAAGAU | 237 |
| 1335 | CAAGGGCUCAGAGGACUGG | 75 | 1335 | CAAGGGCUCAGAGGACUGG | 75 | 1353 | CCAGUCCUCUGAGCCCUUG | 238 |
| 1353 | GACGUGCUCAGACAUCGGU | 76 | 1353 | GACGUGCUCAGACAUCGGU | 76 | 1371 | ACCGAUGUCUGAGCACGUC | 239 |
| 1371 | UGUUCUUCUUCCCAGUUCU | 77 | 1371 | UGUUCUUCUUCCCAGUUCU | 77 | 1389 | AGAACUGGGAAGAAGAACA | 240 |
| 1389 | UUGACCCCUGGUCCUGUCU | 78 | 1389 | UUGACCCCUGGUCCUGUCU | 78 | 1407 | AGACAGGACCAGGGGUCAA | 241 |
| 1407 | UCCAGCCCGUCUUGGCUUA | 79 | 1407 | UCCAGCCCGUCUUGGCUUA | 79 | 1425 | UAAGCCAAGACGGGCUGGA | 242 |
| 1425 | AUCCACUUUGACUCCUUUG | 80 | 1425 | AUCCACUUUGACUCCUUUG | 80 | 1443 | CAAAGGAGUCAAAGUGGAU | 243 |
| 1443 | GAGCCGUUUGGAGGGGCGG | 81 | 1443 | GAGCCGUUUGGAGGGGCGG | 81 | 1461 | CCGCCCCUCCAAACGGCUC | 244 |
| 1461 | GUUUCUGGUAGUUGUGGCU | 82 | 1461 | GUUUCUGGUAGUUGUGGCU | 82 | 1479 | AGCCACAACUACCAGAAAC | 245 |
| 1479 | UUUUAUGCUUUCAAAGAAU | 83 | 1479 | UUUUAUGCUUUCAAAGAAU | 83 | 1497 | AUUCUUUGAAAGCAUAAAA | 246 |
| 1497 | UUUCUUCAGUCCAGAGAAU | 84 | 1497 | UUUCUUCAGUCCAGAGAAU | 84 | 1515 | AUUCUCUGGACUGAAGAAA | 247 |
| 1515 | UUCCUCCUGGCAGCCCUGU | 85 | 1515 | UUCCUCCUGGCAGCCCUGU | 85 | 1533 | ACAGGGCUGCCAGGAGGAA | 248 |
| 1533 | UGUGUGUCACCCAUUGGUG | 86 | 1533 | UGUGUGUCACCCAUUGGUG | 86 | 1551 | CACCAAUGGGUGACACACA | 249 |
| 1551 | GACCUGCGGCAGUAUGUAC | 87 | 1551 | GACCUGCGGCAGUAUGUAC | 87 | 1569 | GUACAUACUGCCGCAGGUC | 250 |
| 1569 | CUUCAGUGCACCUUACUGC | 88 | 1569 | CUUCAGUGCACCUUACUGC | 88 | 1587 | GCAGUAAGGUGCACUGAAG | 251 |
| 1587 | CUUACUGUUGCUUUAGUCA | 89 | 1587 | CUUACUGUUGCUUUAGUCA | 89 | 1605 | UGACUAAAGCAACAGUAAG | 252 |
| 1605 | ACUAAUUGCUUUCUGGUUU | 90 | 1605 | ACUAAUUGCUUUCUGGUUU | 90 | 1623 | AAACCAGAAAGCAAUUAGU | 253 |
| 1623 | UGAAAGAUGCAGUGGUUCC | 91 | 1623 | UGAAAGAUGCAGUGGUUCC | 91 | 1641 | GGAACCACUGCAUCUUUCA | 254 |
| 1641 | CUCCCUCUCCUGAAUCCUU | 92 | 1641 | CUCCCUCUCCUGAAUCCUU | 92 | 1659 | AAGGAUUCAGGAGAGGGAG | 255 |
| 1659 | UUUCUACAUGAUGCCCUGC | 93 | 1659 | UUUCUACAUGAUGCCCUGC | 93 | 1677 | GCAGGGCAUCAUGUAGAAA | 256 |
| 1677 | CUGACCAUGCAGCCGCACC | 94 | 1677 | CUGACCAUGCAGCCGCACC | 94 | 1695 | GGUGCGGCUGCAUGGUCAG | 257 |
| 1695 | CAGAGAGAGAUUCUUCCCC | 95 | 1695 | CAGAGAGAGAUUCUUCCCC | 95 | 1713 | GGGGAAGAAUCUCUCUCUG | 258 |
| 1713 | CAAUUGGCUCUAGUCACUG | 96 | 1713 | CAAUUGGCUCUAGUCACUG | 96 | 1731 | CAGUGACUAGAGCCAAUUG | 259 |
| 1731 | GGCAUCUCACUUUAUGAUA | 97 | 1731 | GGCAUCUCACUUUAUGAUA | 97 | 1749 | UAUCAUAAAGUGAGAUGCC | 260 |
| 1749 | AGGGAAGGCUACUACCUAG | 98 | 1749 | AGGGAAGGCUACUACCUAG | 98 | 1767 | CUAGGUAGUAGCCUUCCCU | 261 |
| 1767 | GGGCACUUUAAGUCAGUGA | 99 | 1767 | GGGCACUUUAAGUCAGUGA | 99 | 1785 | UCACUGACUUAAAGUGCCC | 262 |
| 1785 | ACAGCCCCUUAUUUGCACU | 100 | 1785 | ACAGCCCCUUAUUUGCACU | 100 | 1803 | AGUGCAAAUAAGGGGCUGU | 263 |
| 1803 | UUCACCUUUUGACCAUAAC | 101 | 1803 | UUCACCUUUUGACCAUAAC | 101 | 1821 | GUUAUGGUCAAAAGGUGAA | 264 |
| 1821 | CUGUUUCCCCAGAGCAGGA | 102 | 1821 | CUGUUUCCCCAGAGCAGGA | 102 | 1839 | UCCUGCUCUGGGGAAACAG | 265 |
| 1839 | AGCUUGUGGAAAUACCUUG | 103 | 1839 | AGCUUGUGGAAAUACCUUG | 103 | 1857 | CAAGGUAUUUCCACAAGCU | 266 |
| 1857 | GGCUGAUGUUGCAGCCUGC | 104 | 1857 | GGCUGAUGUUGCAGCCUGC | 104 | 1875 | GCAGGCUGCAACAUCAGCC | 267 |
| 1875 | CAGCAAGUGCUUCCGUCUC | 105 | 1875 | CAGCAAGUGCUUCCGUCUC | 105 | 1893 | GAGACGGAAGCACUUGCUG | 268 |
| 1893 | CCGGAAUCCUUGGGGAGCA | 106 | 1893 | CCGGAAUCCUUGGGGAGCA | 106 | 1911 | UGCUCCCCAAGGAUUCCGG | 269 |
| 1911 | ACUUGUCCACGUCUUUUCU | 107 | 1911 | ACUUGUCCACGUCUUUUCU | 107 | 1929 | AGAAAAGACGUGGACAAGU | 270 |
| 1929 | UCAUAUCAUGGUAGUCACU | 108 | 1929 | UCAUAUCAUGGUAGUCACU | 108 | 1947 | AGUGACUACCAUGAUAUGA | 271 |
| 1947 | UAACAUAUAUAAGGUAUGU | 109 | 1947 | UAACAUAUAUAAGGUAUGU | 109 | 1965 | ACAUACCUUAUAUAUGUUA | 272 |
| 1965 | UGCUAUUGGCCCAGCUUUU | 110 | 1965 | UGCUAUUGGCCCAGCUUUU | 110 | 1983 | AAAAGCUGGGCCAAUAGCA | 273 |
| 1983 | UAGAAAAUGCAGUCAUUUU | 111 | 1983 | UAGAAAAUGCAGUCAUUUU | 111 | 2001 | AAAAUGACUGCAUUUUCUA | 274 |
| 2001 | UUCUAAAUAAAAAGGAAGU | 112 | 2001 | UUCUAAAUAAAAAGGAAGU | 112 | 2019 | ACUUCCUUUUUAUUUAGAA | 275 |
| 2019 | UACUGCACCCAGCAGUGUC | 113 | 2019 | UACUGCACCCAGCAGUGUC | 113 | 2037 | GACACUGCUGGGUGCAGUA | 276 |
| 2037 | CACUCUGUAGUUACUGUGG | 114 | 2037 | CACUCUGUAGUUACUGUGG | 114 | 2055 | CCACAGUAACUACAGAGUG | 277 |
| 2055 | GUCACUUGUACCAUAUAGA | 115 | 2055 | GUCACUUGUACCAUAUAGA | 115 | 2073 | UCUAUAUGGUACAAGUGAC | 278 |
| 2073 | AGGUGUAACACUUGUCAAG | 116 | 2073 | AGGUGUAACACUUGUCAAG | 116 | 2091 | CUUGACAAGUGUUACACCU | 279 |
| 2091 | GAAGCGUUAUGUGCAGUAC | 117 | 2091 | GAAGCGUUAUGUGCAGUAC | 117 | 2109 | GUACUGCACAUAACGCUUC | 280 |
| 2109 | CUUAAUGUUUGUAAGACUU | 118 | 2109 | CUUAAUGUUUGUAAGACUU | 118 | 2127 | AAGUCUUACAAACAUUAAG | 281 |
| 2127 | UACAAAAAAAGAUUUAAAG | 119 | 2127 | UACAAAAAAAGAUUUAAAG | 119 | 2145 | CUUUAAAUCUUUUUUUGUA | 282 |
| 2145 | GUGGCAGCUUCACUCGACA | 120 | 2145 | GUGGCAGCUUCACUCGACA | 120 | 2163 | UGUCGAGUGAAGCUGCCAC | 283 |
| 2163 | AUUUGGUGAGAGAAGUACA | 121 | 2163 | AUUUGGUGAGAGAAGUACA | 121 | 2181 | UGUACUUCUCUCACCAAAU | 284 |
| 2181 | AAAGGUUGCAGUGCUGAGC | 122 | 2181 | AAAGGUUGCAGUGCUGAGC | 122 | 2199 | GCUCAGCACUGCAACCUUU | 285 |
| 2199 | CUGUGGGCGGUUUCUGGGG | 123 | 2199 | CUGUGGGCGGUUUCUGGGG | 123 | 2217 | CCCCAGAAACCGCCCACAG | 286 |
| 2217 | GAUGUCCCAGGGUGGAACU | 124 | 2217 | GAUGUCCCAGGGUGGAACU | 124 | 2235 | AGUUCCACCCUGGGACAUC | 287 |
| 2235 | UCCACAUGCUGGUGCAUAU | 125 | 2235 | UCCACAUGCUGGUGCAUAU | 125 | 2253 | AUAUGCACCAGCAUGUGGA | 288 |
| 2253 | UACGCCCUUGAGCUACUUC | 126 | 2253 | UACGCCCUUGAGCUACUUC | 126 | 2271 | GAAGUAGCUCAAGGGCGUA | 289 |
| 2271 | CAAAUGUGGUUUAUACCUC | 127 | 2271 | CAAAUGUGGUUUAUACCUC | 127 | 2289 | GAGGUAUAAACCACAUUUG | 290 |
| 2289 | CGCAGAUACAAGAAUCUUU | 128 | 2289 | CGCAGAUACAAGAAUCUUU | 128 | 2307 | AAAGAUUCUUGUAUCUGCG | 291 |
| 2307 | UAUGAAUAUACAAUUCUUU | 129 | 2307 | UAUGAAUAUACAAUUCUUU | 129 | 2325 | AAAGAAUUGUAUAUUCAUA | 292 |
| 2325 | UUUCCUUCUACAGCUUAGC | 130 | 2325 | UUUCCUUCUACAGCUUAGC | 130 | 2343 | GCUAAGCUGUAGAAGGAAA | 293 |
| 2343 | CUCCGUCUUUUCAACCACG | 131 | 2343 | CUCCGUCUUUUCAACCACG | 131 | 2361 | CGUGGUUGAAAAGACGGAG | 294 |
| 2361 | GAACAUUUAAAACCCGACC | 132 | 2361 | GAACAUUUAAAACCCGACC | 132 | 2379 | GGUCGGGUUUUAAAUGUUC | 295 |
| 2379 | CUACUAGCACUGUUCUGUC | 133 | 2379 | CUACUAGCACUGUUCUGUC | 133 | 2397 | GACAGAACAGUGCUAGUAG | 296 |
| 2397 | CCUCAAGUACUCAAAUAUU | 134 | 2397 | CCUCAAGUACUCAAAUAUU | 134 | 2415 | AAUAUUUGAGUACUUGAGG | 297 |
| 2415 | UUCUGAUACUGCUGAGUCA | 135 | 2415 | UUCUGAUACUGCUGAGUCA | 135 | 2433 | UGACUCAGCAGUAUCAGAA | 298 |
| 2433 | AGACUGUCAGAAAAAGCUA | 136 | 2433 | AGACUGUCAGAAAAAGCUA | 136 | 2451 | UAGCUUUUUCUGACAGUCU | 299 |
| 2451 | AGCACUAACUCGUGUUUGG | 137 | 2451 | AGCACUAACUCGUGUUUGG | 137 | 2469 | CCAAACACGAGUUAGUGCU | 300 |
| 2469 | GAGCUCUAUCCAUAUUUUA | 138 | 2469 | GAGCUCUAUCCAUAUUUUA | 138 | 2487 | UAAAAUAUGGAUAGAGCUC | 301 |
| 2487 | ACUGAUCUCUUUAAGUAUU | 139 | 2487 | ACUGAUCUCUUUAAGUAUU | 139 | 2505 | AAUACUUAAAGAGAUCAGU | 302 |
| 2505 | UUGUUCCUGCCACUGUGUA | 140 | 2505 | UUGUUCCUGCCACUGUGUA | 140 | 2523 | UACACAGUGGCAGGAACAA | 303 |
| 2523 | ACUGUGGAGUUGACUCGGU | 141 | 2523 | ACUGUGGAGUUGACUCGGU | 141 | 2541 | ACCGAGUCAACUCCACAGU | 304 |
| 2541 | UGUUCUGUCCCAGUGCGGU | 142 | 2541 | UGUUCUGUCCCAGUGCGGU | 142 | 2559 | ACCGCACUGGGACAGAACA | 305 |
| 2559 | UGCCUCCUCUUGACUUCCC | 143 | 2559 | UGCCUCCUCUUGACUUCCC | 143 | 2577 | GGGAAGUCAAGAGGAGGCA | 306 |
| 2577 | CCACUGCUCUCUGUGGUGA | 144 | 2577 | CCACUGCUCUCUGUGGUGA | 144 | 2595 | UCACCACAGAGAGCAGUGG | 307 |
| 2595 | AGAAAUUUGCCUUGUUCAA | 145 | 2595 | AGAAAUUUGCCUUGUUCAA | 145 | 2613 | UUGAACAAGGCAAAUUUCU | 308 |
| 2613 | AUAAUUACUGUACCCUCGC | 146 | 2613 | AUAAUUACUGUACCCUCGC | 146 | 2631 | GCGAGGGUACAGUAAUUAU | 309 |
| 2631 | CAUGACUGUUACAGCUUUC | 147 | 2631 | CAUGACUGUUACAGCUUUC | 147 | 2649 | GAAAGCUGUAACAGUCAUG | 310 |
| 2649 | CUGUGCAGAGAUGACUGUC | 148 | 2649 | CUGUGCAGAGAUGACUGUC | 148 | 2667 | GACAGUCAUCUCUGCACAG | 311 |
| 2667 | CCAAGUGCCACAUGCCUAC | 149 | 2667 | CCAAGUGCCACAUGCCUAC | 149 | 2685 | GUAGGCAUGUGGCACUUGG | 312 |
| 2685 | CGAUUGAAAUGAAAACUCU | 150 | 2685 | CGAUUGAAAUGAAAACUCU | 150 | 2703 | AGAGUUUUCAUUUCAAUCG | 313 |
| 2703 | UAUUGUUACCUCUGAGUUG | 151 | 2703 | UAUUGUUACCUCUGAGUUG | 151 | 2721 | CAACUCAGAGGUAACAAUA | 314 |
| 2721 | GUGUUCCACGGAAAAUGCU | 152 | 2721 | GUGUUCCACGGAAAAUGCU | 152 | 2739 | AGCAUUUUCCGUGGAACAC | 315 |
| 2739 | UAUCCAGCAGAUCAUUUAG | 153 | 2739 | UAUCCAGCAGAUCAUUUAG | 153 | 2757 | CUAAAUGAUCUGCUGGAUA | 316 |
| 2757 | GGAAAAAUAAUUCUAUUUU | 154 | 2757 | GGAAAAAUAAUUCUAUUUU | 154 | 2775 | AAAAUAGAAUUAUUUUUCC | 317 |
| 2775 | UUAGCUUUUCAUUUCUCAG | 155 | 2775 | UUAGCUUUUCAUUUCUCAG | 155 | 2793 | CUGAGAAAUGAAAAGCUAA | 318 |
| 2793 | GCUGUCCUUUUUUCUUGUU | 156 | 2793 | GCUGUCCUUUUUUCUUGUU | 156 | 2811 | AACAAGAAAAAAGGACAGC | 319 |
| 2811 | UUGAUUUUUGACAGCAAUG | 157 | 2811 | UUGAUUUUUGACAGCAAUG | 157 | 2829 | CAUUGCUGUCAAAAAUCAA | 320 |
| 2829 | GGAGAAUGGGUUAUAUAAA | 158 | 2829 | GGAGAAUGGGUUAUAUAAA | 158 | 2847 | UUUAUAUAACCCAUUCUCC | 321 |
| 2847 | AGACUGCCUGCUAAUAUGA | 159 | 2847 | AGACUGCCUGCUAAUAUGA | 159 | 2865 | UCAUAUUAGCAGGCAGUCU | 322 |
| 2865 | AACAGAAAUGCAUUUGUAA | 160 | 2865 | AACAGAAAUGCAUUUGUAA | 160 | 2883 | UUACAAAUGCAUUUCUGUU | 323 |
| 2883 | AUUCAUGAAAAUAAAUGUA | 161 | 2883 | AUUCAUGAAAAUAAAUGUA | 161 | 2901 | UACAUUUAUUUUCAUGAAU | 324 |
| 2901 | ACAUCUUCUAUCUUCAAAA | 162 | 2901 | ACAUCUUCUAUCUUCAAAA | 162 | 2919 | UUUUGAAGAUAGAAGAUGU | 325 |
| 2913 | UUCAAAAAAAAAAAAAAAA | 163 | 2913 | UUCAAAAAAAAAAAAAAAA | 163 | 2931 | UUUUUUUUUUUUUUUUGAA | 326 |

MAPK3 XM_055766.6

| | | | | | | | | |
|---|---|---|---|---|---|---|---|---|
| 3 | CGGGGCCUCGGGCGGGGCC | 327 | 3 | CGGGGCCUCGGGCGGGGCC | 327 | 21 | GGCCCCGCCCGAGGCCCCG | 432 |
| 21 | CGCCGUGGGGAGGAGGGCG | 328 | 21 | CGCCGUGGGGAGGAGGGCG | 328 | 39 | CGCCCUCCUCCCCACGGCG | 433 |
| 39 | GGUGGGAGGGGAGGAGUGG | 329 | 39 | GGUGGGAGGGGAGGAGUGG | 329 | 57 | CCACUCCUCCCCUCCCACC | 434 |
| 57 | GAGAUGGCGGCGGCGGCGG | 330 | 57 | GAGAUGGCGGCGGCGGCGG | 330 | 75 | CCGCCGCCGCCGCCAUCUC | 435 |
| 75 | GCUCAGGGGGGCGGGGGCG | 331 | 75 | GCUCAGGGGGGCGGGGGCG | 331 | 93 | CGCCCCCGCCCCCCUGAGC | 436 |
| 93 | GGGGAGCCCCGUAGAACCG | 332 | 93 | GGGGAGCCCCGUAGAACCG | 332 | 111 | CGGUUCUACGGGGCUCCCC | 437 |
| 111 | GAGGGGGUCGGCCCGGGGG | 333 | 111 | GAGGGGGUCGGCCCGGGGG | 333 | 129 | CCCCCGGGCCGACCCCCUC | 438 |
| 129 | GUCCCGGGGGAGGUGGAGA | 334 | 129 | GUCCCGGGGGAGGUGGAGA | 334 | 147 | UCUCCACCUCCCCCGGGAC | 439 |
| 147 | AUGGUGAAGGGGCAGCCGU | 335 | 147 | AUGGUGAAGGGGCAGCCGU | 335 | 165 | ACGGCUGCCCCUUCACCAU | 440 |
| 165 | UUCGACGUGGGCCCGCGCU | 336 | 165 | UUCGACGUGGGCCCGCGCU | 336 | 183 | AGCGCGGGCCCACGUCGAA | 441 |
| 183 | UACACGCAGUUGCAGUACA | 337 | 183 | UACACGCAGUUGCAGUACA | 337 | 201 | UGUACUGCAACUGCGUGUA | 442 |
| 201 | AUCGGCGAGGGCGCGUACG | 338 | 201 | AUCGGCGAGGGCGCGUACG | 338 | 219 | CGUACGCGCCCUCGCCGAU | 443 |
| 219 | GGCAUGGUCAGCUCGGCCU | 339 | 219 | GGCAUGGUCAGCUCGGCCU | 339 | 237 | AGGCCGAGCUGACCAUGCC | 444 |
| 237 | UAUGACCACGUGCGCAAGA | 340 | 237 | UAUGACCACGUGCGCAAGA | 340 | 255 | UCUUGCGCACGUGGUCAUA | 445 |
| 255 | ACUCGCGUGGCCAUCAAGA | 341 | 255 | ACUCGCGUGGCCAUCAAGA | 341 | 273 | UCUUGAUGGCCACGCGAGU | 446 |
| 273 | AAGAUCAGCCCCUUCGAAC | 342 | 273 | AAGAUCAGCCCCUUCGAAC | 342 | 291 | GUUCGAAGGGGCUGAUCUU | 447 |
| 291 | CAUCAGACCUACUGCCAGC | 343 | 291 | CAUCAGACCUACUGCCAGC | 343 | 309 | GCUGGCAGUAGGUCUGAUG | 448 |
| 309 | CGCACGCUCCGGGAGAUCC | 344 | 309 | CGCACGCUCCGGGAGAUCC | 344 | 327 | GGAUCUCCCGGAGCGUGCG | 449 |
| 327 | CAGAUCCUGCUGCGCUUCC | 345 | 327 | CAGAUCCUGCUGCGCUUCC | 345 | 345 | GGAAGCGCAGCAGGAUCUG | 450 |
| 345 | CGCCAUGAGAAUGUCAUCG | 346 | 345 | CGCCAUGAGAAUGUCAUCG | 346 | 363 | CGAUGACAUUCUCAUGGCG | 451 |
| 363 | GGCAUCCGAGACAUUCUGC | 347 | 363 | GGCAUCCGAGACAUUCUGC | 347 | 381 | GCAGAAUGUCUCGGAUGCC | 452 |
| 381 | CGGGCGUCCACCCUGGAAG | 348 | 381 | CGGGCGUCCACCCUGGAAG | 348 | 399 | CUUCCAGGGUGGACGCCCG | 453 |
| 399 | GCCAUGAGAGAUGUCUACA | 349 | 399 | GCCAUGAGAGAUGUCUACA | 349 | 417 | UGUAGACAUCUCUCAUGGC | 454 |
| 417 | AUUGUGCAGGACCUGAUGG | 350 | 417 | AUUGUGCAGGACCUGAUGG | 350 | 435 | CCAUCAGGUCCUGCACAAU | 455 |
| 435 | GAGACUGACCUGUACAAGU | 351 | 435 | GAGACUGACCUGUACAAGU | 351 | 453 | ACUUGUACAGGUCAGUCUC | 456 |
| 453 | UUGCUGAAAAGCCAGCAGC | 352 | 453 | UUGCUGAAAAGCCAGCAGC | 352 | 471 | GCUGCUGGCUUUUCAGCAA | 457 |
| 471 | CUGAGCAAUGACCAUAUCU | 353 | 471 | CUGAGCAAUGACCAUAUCU | 353 | 489 | AGAUAUGGUCAUUGCUCAG | 458 |
| 489 | UGCUACUUCCUCUACCAGA | 354 | 489 | UGCUACUUCCUCUACCAGA | 354 | 507 | UCUGGUAGAGGAAGUAGCA | 459 |
| 507 | AUCCUGCGGGGCCUCAAGU | 355 | 507 | AUCCUGCGGGGCCUCAAGU | 355 | 525 | ACUUGAGGCCCCGCAGGAU | 460 |
| 525 | UACAUCCACUCCGCCAACG | 356 | 525 | UACAUCCACUCCGCCAACG | 356 | 543 | CGUUGGCGGAGUGGAUGUA | 461 |
| 543 | GUGCUCCACCGAGAUCUAA | 357 | 543 | GUGCUCCACCGAGAUCUAA | 357 | 561 | UUAGAUCUCGGUGGAGCAC | 462 |
| 561 | AAGCCCUCCAACCUGCUCA | 358 | 561 | AAGCCCUCCAACCUGCUCA | 358 | 579 | UGAGCAGGUUGGAGGGCUU | 463 |
| 579 | AUCAACACCACCUGCGACC | 359 | 579 | AUCAACACCACCUGCGACC | 359 | 597 | GGUCGCAGGUGGUGUUGAU | 464 |
| 597 | CUUAAGAUUUGUGAUUUCG | 360 | 597 | CUUAAGAUUUGUGAUUUCG | 360 | 615 | CGAAAUCACAAAUCUUAAG | 465 |
| 615 | GGCCUGGCCCGGAUUGCCG | 361 | 615 | GGCCUGGCCCGGAUUGCCG | 361 | 633 | CGGCAAUCCGGGCCAGGCC | 466 |
| 633 | GAUCCUGAGCAUGACCACA | 362 | 633 | GAUCCUGAGCAUGACCACA | 362 | 651 | UGUGGUCAUGCUCAGGAUC | 467 |
| 651 | ACCGGCUUCCUGACGGAGU | 363 | 651 | ACCGGCUUCCUGACGGAGU | 363 | 669 | ACUCCGUCAGGAAGCCGGU | 468 |
| 669 | UAUGUGGCUACGCGCUGGU | 364 | 669 | UAUGUGGCUACGCGCUGGU | 364 | 687 | ACCAGCGCGUAGCCACAUA | 469 |
| 687 | UACCGGGCCCCAGAGAUCA | 365 | 687 | UACCGGGCCCCAGAGAUCA | 365 | 705 | UGAUCUCUGGGGCCCGGUA | 470 |
| 705 | AUGCUGAACUCCAAGGGCU | 366 | 705 | AUGCUGAACUCCAAGGGCU | 366 | 723 | AGCCCUUGGAGUUCAGCAU | 471 |
| 723 | UAUACCAAGUCCAUCGACA | 367 | 723 | UAUACCAAGUCCAUCGACA | 367 | 741 | UGUCGAUGGACUUGGUAUA | 472 |
| 741 | AUCUGGUCUGUGGGCUGCA | 368 | 741 | AUCUGGUCUGUGGGCUGCA | 368 | 759 | UGCAGCCCACAGACCAGAU | 473 |
| 759 | AUUCUGGCUGAGAUGCUCU | 369 | 759 | AUUCUGGCUGAGAUGCUCU | 369 | 777 | AGAGCAUCUCAGCCAGAAU | 474 |
| 777 | UCUAACCGGCCCAUCUUCC | 370 | 777 | UCUAACCGGCCCAUCUUCC | 370 | 795 | GGAAGAUGGGCCGGUUAGA | 475 |
| 795 | CCUGGCAAGCACUACCUGG | 371 | 795 | CCUGGCAAGCACUACCUGG | 371 | 813 | CCAGGUAGUGCUUGCCAGG | 476 |
| 813 | GAUCAGCUCAACCACAUUC | 372 | 813 | GAUCAGCUCAACCACAUUC | 372 | 831 | GAAUGUGGUUGAGCUGAUC | 477 |
| 831 | CUGGGCAUCCUGGGCUCCC | 373 | 831 | CUGGGCAUCCUGGGCUCCC | 373 | 849 | GGGAGCCCAGGAUGCCCAG | 478 |
| 849 | CCAUCCCAGGAGGACCUGA | 374 | 849 | CCAUCCCAGGAGGACCUGA | 374 | 867 | UCAGGUCCUCCUGGGAUGG | 479 |
| 867 | AAUUGUAUCAUCAACAUGA | 375 | 867 | AAUUGUAUCAUCAACAUGA | 375 | 885 | UCAUGUUGAUGAUACAAUU | 480 |
| 885 | AAGGCCCGAAACUACCUAC | 376 | 885 | AAGGCCCGAAACUACCUAC | 376 | 903 | GUAGGUAGUUUCGGGCCUU | 481 |
| 903 | CAGUCUCUGCCCUCCAAGA | 377 | 903 | CAGUCUCUGCCCUCCAAGA | 377 | 921 | UCUUGGAGGGCAGAGACUG | 482 |
| 921 | ACCAAGGUGGCUUGGGCCA | 378 | 921 | ACCAAGGUGGCUUGGGCCA | 378 | 939 | UGGCCCAAGCCACCUUGGU | 483 |
| 939 | AAGCUUUUCCCCAAGUCAG | 379 | 939 | AAGCUUUUCCCCAAGUCAG | 379 | 957 | CUGACUUGGGGAAAAGCUU | 484 |
| 957 | GACUCCAAAGCCCUUGACC | 380 | 957 | GACUCCAAAGCCCUUGACC | 380 | 975 | GGUCAAGGGCUUUGGAGUC | 485 |
| 975 | CUGCUGGACCGGAUGUUAA | 381 | 975 | CUGCUGGACCGGAUGUUAA | 381 | 993 | UUAACAUCCGGUCCAGCAG | 486 |
| 993 | ACCUUUAACCCCAAUAAAC | 382 | 993 | ACCUUUAACCCCAAUAAAC | 382 | 1011 | GUUUAUUGGGGUUAAAGGU | 487 |
| 1011 | CGGAUCACAGUGGAGGAAG | 383 | 1011 | CGGAUCACAGUGGAGGAAG | 383 | 1029 | CUUCCUCCACUGUGAUCCG | 488 |
| 1029 | GCGCUGGCUCACCCCUACC | 384 | 1029 | GCGCUGGCUCACCCCUACC | 384 | 1047 | GGUAGGGGUGAGCCAGCGC | 489 |
| 1047 | CUGGAGCAGUACUAUGACC | 385 | 1047 | CUGGAGCAGUACUAUGACC | 385 | 1065 | GGUCAUAGUACUGCUCCAG | 490 |
| 1065 | CCGACGGAUGAGCCAGUGG | 386 | 1065 | CCGACGGAUGAGCCAGUGG | 386 | 1083 | CCACUGGCUCAUCCGUCGG | 491 |
| 1083 | GCCGAGGAGCCCUUCACCU | 387 | 1083 | GCCGAGGAGCCCUUCACCU | 387 | 1101 | AGGUGAAGGGCUCCUCGGC | 492 |
| 1101 | UUCGCCAUGGAGCUGGAUG | 388 | 1101 | UUCGCCAUGGAGCUGGAUG | 388 | 1119 | CAUCCAGCUCCAUGGCGAA | 493 |
| 1119 | GACCUACCUAAGGAGCGGC | 389 | 1119 | GACCUACCUAAGGAGCGGC | 389 | 1137 | GCCGCUCCUUAGGUAGGUC | 494 |
| 1137 | CUGAAGGAGCUCAUCUUCC | 390 | 1137 | CUGAAGGAGCUCAUCUUCC | 390 | 1155 | GGAAGAUGAGCUCCUUCAG | 495 |
| 1155 | CAGGAGACAGCACGCUUCC | 391 | 1155 | CAGGAGACAGCACGCUUCC | 391 | 1173 | GGAAGCGUGCUGUCUCCUG | 496 |
| 1173 | CAGCCCGGAGUGCUGGAGG | 392 | 1173 | CAGCCCGGAGUGCUGGAGG | 392 | 1191 | CCUCCAGCACUCCGGGCUG | 497 |
| 1191 | GCCCCCUAGCCCAGACAGA | 393 | 1191 | GCCCCCUAGCCCAGACAGA | 393 | 1209 | UCUGUCUGGGCUAGGGGGC | 498 |
| 1209 | ACAUCUCUGCACCCUGGGG | 394 | 1209 | ACAUCUCUGCACCCUGGGG | 394 | 1227 | CCCCAGGGUGCAGAGAUGU | 499 |
| 1227 | GCCUGGAACAGAACUGGCA | 395 | 1227 | GCCUGGAACAGAACUGGCA | 395 | 1245 | UGCCAGUUCUGUUCCAGGC | 500 |
| 1245 | AAAGAGGCAAGAGGUCACU | 396 | 1245 | AAAGAGGCAAGAGGUCACU | 396 | 1263 | AGUGACCUCUUGCCUCUUU | 501 |
| 1263 | UGAGGGCCUCUGUCACCCA | 397 | 1263 | UGAGGGCCUCUGUCACCCA | 397 | 1281 | UGGGUGACAGAGGCCCUCA | 502 |
| 1281 | AGGACCUGCCUCCUGCCUG | 398 | 1281 | AGGACCUGCCUCCUGCCUG | 398 | 1299 | CAGGCAGGAGGCAGGUCCU | 503 |
| 1299 | GCCCCUCUCCCGCCAGACU | 399 | 1299 | GCCCCUCUCCCGCCAGACU | 399 | 1317 | AGUCUGGCGGGAGAGGGGC | 504 |
| 1317 | UGUUAGAAAAUGGACACUG | 400 | 1317 | UGUUAGAAAAUGGACACUG | 400 | 1335 | CAGUGUCCAUUUUCUAACA | 505 |
| 1335 | GUGCCCAGCCCGGACCUUG | 401 | 1335 | GUGCCCAGCCCGGACCUUG | 401 | 1353 | CAAGGUCCGGGCUGGGCAC | 506 |
| 1353 | GGCAGCCCAGGCCGGGGUG | 402 | 1353 | GGCAGCCCAGGCCGGGGUG | 402 | 1371 | CACCCCGGCCUGGGCUGCC | 507 |
| 1371 | GGAGCAUGGGCCUGGCCAC | 403 | 1371 | GGAGCAUGGGCCUGGCCAC | 403 | 1389 | GUGGCCAGGCCCAUGCUCC | 508 |
| 1389 | CCUCUCUCCUUUGCUGAGG | 404 | 1389 | CCUCUCUCCUUUGCUGAGG | 404 | 1407 | CCUCAGCAAAGGAGAGAGG | 509 |
| 1407 | GCCUCCAGCUUCAGGCAGG | 405 | 1407 | GCCUCCAGCUUCAGGCAGG | 405 | 1425 | CCUGCCUGAAGCUGGAGGC | 510 |
| 1425 | GCCAAGGCCUUCUCCUCCC | 406 | 1425 | GCCAAGGCCUUCUCCUCCC | 406 | 1443 | GGGAGGAGAAGGCCUUGGC | 511 |
| 1443 | CCACCCGCCCUCCCCACGG | 407 | 1443 | CCACCCGCCCUCCCCACGG | 407 | 1461 | CCGUGGGGAGGGCGGGUGG | 512 |
| 1461 | GGGCCUCGGGACCUCAGGU | 408 | 1461 | GGGCCUCGGGACCUCAGGU | 408 | 1479 | ACCUGAGGUCCCGAGGCCC | 513 |
| 1479 | UGGCCCCAGUUCAAUCUCC | 409 | 1479 | UGGCCCCAGUUCAAUCUCC | 409 | 1497 | GGAGAUUGAACUGGGGCCA | 514 |
| 1497 | CCGCUGCUGCUGCUGCGCC | 410 | 1497 | CCGCUGCUGCUGCUGCGCC | 410 | 1515 | GGCGCAGCAGCAGCAGCGG | 515 |
| 1515 | CCUUACCUUCCCCAGCGUC | 411 | 1515 | CCUUACCUUCCCCAGCGUC | 411 | 1533 | GACGCUGGGGAAGGUAAGG | 516 |
| 1533 | CCCAGUCUCUGGCAGUUCU | 412 | 1533 | CCCAGUCUCUGGCAGUUCU | 412 | 1551 | AGAACUGCCAGAGACUGGG | 517 |
| 1551 | UGGAAUGGAAGGGUUCUGG | 413 | 1551 | UGGAAUGGAAGGGUUCUGG | 413 | 1569 | CCAGAACCCUUCCAUUCCA | 518 |
| 1569 | GCUGCCCCAACCUGCUGAA | 414 | 1569 | GCUGCCCCAACCUGCUGAA | 414 | 1587 | UUCAGCAGGUUGGGGCAGC | 519 |
| 1587 | AGGGCAGAGGUGGAGGGUG | 415 | 1587 | AGGGCAGAGGUGGAGGGUG | 415 | 1605 | CACCCUCCACCUCUGCCCU | 520 |
| 1605 | GGGGGGCGCUGAGUAGGGA | 416 | 1605 | GGGGGGCGCUGAGUAGGGA | 416 | 1623 | UCCCUACUCAGCGCCCCCC | 521 |
| 1623 | ACUCAGGGCCAUGCCUGCC | 417 | 1623 | ACUCAGGGCCAUGCCUGCC | 417 | 1641 | GGCAGGCAUGGCCCUGAGU | 522 |
| 1641 | CCCCCUCAUCUCAUUCAAA | 418 | 1641 | CCCCCUCAUCUCAUUCAAA | 418 | 1659 | UUUGAAUGAGAUGAGGGGG | 523 |
| 1659 | ACCCCACCCUAGUUUCCCU | 419 | 1659 | ACCCCACCCUAGUUUCCCU | 419 | 1677 | AGGGAAACUAGGGUGGGGU | 524 |
| 1677 | UGAAGGAACAUUCCUUAGU | 420 | 1677 | UGAAGGAACAUUCCUUAGU | 420 | 1695 | ACUAAGGAAUGUUCCUUCA | 525 |
| 1695 | UCUCAAGGGCUAGCAUCCC | 421 | 1695 | UCUCAAGGGCUAGCAUCCC | 421 | 1713 | GGGAUGCUAGCCCUUGAGA | 526 |
| 1713 | CUGAGGAGCCAGGCCGGGC | 422 | 1713 | CUGAGGAGCCAGGCCGGGC | 422 | 1731 | GCCCGGCCUGGCUCCUCAG | 527 |
| 1731 | CCGAAUCCCCUCCCUGUCA | 423 | 1731 | CCGAAUCCCCUCCCUGUCA | 423 | 1749 | UGACAGGGAGGGGAUUCGG | 528 |
| 1749 | AAAGCUGUCACUUCGCGUG | 424 | 1749 | AAAGCUGUCACUUCGCGUG | 424 | 1767 | CACGCGAAGUGACAGCUUU | 529 |
| 1767 | GCCCUCGCUGCUUCUGUGU | 425 | 1767 | GCCCUCGCUGCUUCUGUGU | 425 | 1785 | ACACAGAAGCAGCGAGGGC | 530 |
| 1785 | UGUGGUGAGCAGAAGUGGA | 426 | 1785 | UGUGGUGAGCAGAAGUGGA | 426 | 1803 | UCCACUUCUGCUCACCACA | 531 |
| 1803 | AGCUGGGGGGCGUGGAGAG | 427 | 1803 | AGCUGGGGGGCGUGGAGAG | 427 | 1821 | CUCUCCACGCCCCCCAGCU | 532 |
| 1821 | GCCCGGCGCCCCUGCCACC | 428 | 1821 | GCCCGGCGCCCCUGCCACC | 428 | 1839 | GGUGGCAGGGGCGCCGGGC | 533 |
| 1839 | CUCCCUGACCCGUCUAAUA | 429 | 1839 | CUCCCUGACCCGUCUAAUA | 429 | 1857 | UAUUAGACGGGUCAGGGAG | 534 |
| 1857 | AUAUAAAUAUAGAGAUGUG | 430 | 1857 | AUAUAAAUAUAGAGAUGUG | 430 | 1875 | CACAUCUCUAUAUUUAUAU | 535 |
| 1865 | AUAGAGAUGUGUCUAUGGC | 431 | 1865 | AUAGAGAUGUGUCUAUGGC | 431 | 1883 | GCCAUAGACACAUCUCUAU | 536 |

MAPK8 NM_002750.2I

| | | | | | | | | |
|---|---|---|---|---|---|---|---|---|
| 3 | UAAUUGCUUGCCAUCAUGA | 537 | 3 | UAAUUGCUUGCCAUCAUGA | 537 | 21 | UCAUGAUGGCAAGCAAUUA | 616 |
| 21 | AGCAGAAGCAAGCGUGACA | 538 | 21 | AGCAGAAGCAAGCGUGACA | 538 | 39 | UGUCACGCUUGCUUCUGCU | 617 |
| 39 | AACAAUUUUUAUAGUGUAG | 539 | 39 | AACAAUUUUUAUAGUGUAG | 539 | 57 | CUACACUAUAAAAAUUGUU | 618 |
| 57 | GAGAUUGGAGAUUCUACAU | 540 | 57 | GAGAUUGGAGAUUCUACAU | 540 | 75 | AUGUAGAAUCUCCAAUCUC | 619 |
| 75 | UUCACAGUCCUGAAACGAU | 541 | 75 | UUCACAGUCCUGAAACGAU | 541 | 93 | AUCGUUUCAGGACUGUGAA | 620 |
| 93 | UAUCAGAAUUUAAAACCUA | 542 | 93 | UAUCAGAAUUUAAAACCUA | 542 | 111 | UAGGUUUUAAAUUCUGAUA | 621 |
| 111 | AUAGGCUCAGGAGCUCAAG | 543 | 111 | AUAGGCUCAGGAGCUCAAG | 543 | 129 | CUUGAGCUCCUGAGCCUAU | 622 |
| 129 | GGAAUAGUAUGCGCAGCUU | 544 | 129 | GGAAUAGUAUGCGCAGCUU | 544 | 147 | AAGCUGCGCAUACUAUUCC | 623 |
| 147 | UAUGAUGCCAUUCUUGAAA | 545 | 147 | UAUGAUGCCAUUCUUGAAA | 545 | 165 | UUUCAAGAAUGGCAUCAUA | 624 |
| 165 | AGAAAUGUUGCAAUCAAGA | 546 | 165 | AGAAAUGUUGCAAUCAAGA | 546 | 183 | UCUUGAUUGCAACAUUUCU | 625 |
| 183 | AAGCUAAGCCGACCAUUUC | 547 | 183 | AAGCUAAGCCGACCAUUUC | 547 | 201 | GAAAUGGUCGGCUUAGCUU | 626 |
| 201 | CAGAAUCAGACUCAUGCCA | 548 | 201 | CAGAAUCAGACUCAUGCCA | 548 | 219 | UGGCAUGAGUCUGAUUCUG | 627 |
| 219 | AAGCGGGCCUACAGAGAGC | 549 | 219 | AAGCGGGCCUACAGAGAGC | 549 | 237 | GCUCUCUGUAGGCCCGCUU | 628 |
| 237 | CUAGUUCUUAUGAAAUGUG | 550 | 237 | CUAGUUCUUAUGAAAUGUG | 550 | 255 | CACAUUUCAUAAGAACUAG | 629 |
| 255 | GUUAAUCACAAAAAUAUAA | 551 | 255 | GUUAAUCACAAAAAUAUAA | 551 | 273 | UUAUAUUUUUGUGAUUAAC | 630 |
| 273 | AUUGGCCUUUUGAAUGUUU | 552 | 273 | AUUGGCCUUUUGAAUGUUU | 552 | 291 | AAACAUUCAAAAGGCCAAU | 631 |
| 291 | UUCACACCACAGAAAUCCC | 553 | 291 | UUCACACCACAGAAAUCCC | 553 | 309 | GGGAUUUCUGUGGUGUGAA | 632 |
| 309 | CUAGAAGAAUUUCAAGAUG | 554 | 309 | CUAGAAGAAUUUCAAGAUG | 554 | 327 | CAUCUUGAAAUUCUUCUAG | 633 |
| 327 | GUUUACAUAGUCAUGGAGC | 555 | 327 | GUUUACAUAGUCAUGGAGC | 555 | 345 | GCUCCAUGACUAUGUAAAC | 634 |
| 345 | CUCAUGGAUGCAAAUCUUU | 556 | 345 | CUCAUGGAUGCAAAUCUUU | 556 | 363 | AAAGAUUUGCAUCCAUGAG | 635 |
| 363 | UGCCAAGUGAUUCAGAUGG | 557 | 363 | UGCCAAGUGAUUCAGAUGG | 557 | 381 | CCAUCUGAAUCACUUGGCA | 636 |
| 381 | GAGCUAGAUCAUGAAAGAA | 558 | 381 | GAGCUAGAUCAUGAAAGAA | 558 | 399 | UUCUUUCAUGAUCUAGCUC | 637 |
| 399 | AUGUCCUACCUUCUCUAUC | 559 | 399 | AUGUCCUACCUUCUCUAUC | 559 | 417 | GAUAGAGAAGGUAGGACAU | 638 |
| 417 | CAGAUGCUGUGUGGAAUCA | 560 | 417 | CAGAUGCUGUGUGGAAUCA | 560 | 435 | UGAUUCCACACAGCAUCUG | 639 |
| 435 | AAGCACCUUCAUUCUGCUG | 561 | 435 | AAGCACCUUCAUUCUGCUG | 561 | 453 | CAGCAGAAUGAAGGUGCUU | 640 |
| 453 | GGAAUUAUUCAUCGGGACU | 562 | 453 | GGAAUUAUUCAUCGGGACU | 562 | 471 | AGUCCCGAUGAAUAAUUCC | 641 |
| 471 | UUAAAGCCCAGUAAUAUAG | 563 | 471 | UUAAAGCCCAGUAAUAUAG | 563 | 489 | CUAUAUUACUGGGCUUUAA | 642 |
| 489 | GUAGUAAAAUCUGAUUGCA | 564 | 489 | GUAGUAAAAUCUGAUUGCA | 564 | 507 | UGCAAUCAGAUUUUACUAC | 643 |
| 507 | ACUUUGAAGAUUCUUGACU | 565 | 507 | ACUUUGAAGAUUCUUGACU | 565 | 525 | AGUCAAGAAUCUUCAAAGU | 644 |
| 525 | UUCGGUCUGGCCAGGACUG | 566 | 525 | UUCGGUCUGGCCAGGACUG | 566 | 543 | CAGUCCUGGCCAGACCGAA | 645 |
| 543 | GCAGGAACGAGUUUUAUGA | 567 | 543 | GCAGGAACGAGUUUUAUGA | 567 | 561 | UCAUAAAACUCGUUCCUGC | 646 |
| 561 | AUGACGCCUUAUGUAGUGA | 568 | 561 | AUGACGCCUUAUGUAGUGA | 568 | 579 | UCACUACAUAAGGCGUCAU | 647 |
| 579 | ACUCGCUACUACAGAGCAC | 569 | 579 | ACUCGCUACUACAGAGCAC | 569 | 597 | GUGCUCUGUAGUAGCGAGU | 648 |
| 597 | CCCGAGGUCAUCCUUGGCA | 570 | 597 | CCCGAGGUCAUCCUUGGCA | 570 | 615 | UGCCAAGGAUGACCUCGGG | 649 |
| 615 | AUGGGCUACAAGGAAAACG | 571 | 615 | AUGGGCUACAAGGAAAACG | 571 | 633 | CGUUUUCCUUGUAGCCCAU | 650 |
| 633 | GUGGAUUUAUGGUCUGUGG | 572 | 633 | GUGGAUUUAUGGUCUGUGG | 572 | 651 | CCACAGACCAUAAAUCCAC | 651 |
| 651 | GGGUGCAUUAUGGGAGAAA | 573 | 651 | GGGUGCAUUAUGGGAGAAA | 573 | 669 | UUUCUCCCAUAAUGCACCC | 652 |
| 669 | AUGGUUUGCCACAAAAUCC | 574 | 669 | AUGGUUUGCCACAAAAUCC | 574 | 687 | GGAUUUUGUGGCAAACCAU | 653 |
| 687 | CUCUUUCCAGGAAGGGACU | 575 | 687 | CUCUUUCCAGGAAGGGACU | 575 | 705 | AGUCCCUUCCUGGAAAGAG | 654 |
| 705 | UAUAUUGAUCAGUGGAAUA | 576 | 705 | UAUAUUGAUCAGUGGAAUA | 576 | 723 | UAUUCCACUGAUCAAUAUA | 655 |
| 723 | AAAGUUAUUGAACAGCUUG | 577 | 723 | AAAGUUAUUGAACAGCUUG | 577 | 741 | CAAGCUGUUCAAUAACUUU | 656 |
| 741 | GGAACACCAUGUCCUGAAU | 578 | 741 | GGAACACCAUGUCCUGAAU | 578 | 759 | AUUCAGGACAUGGUGUUCC | 657 |
| 759 | UUCAUGAAGAAACUGCAAC | 579 | 759 | UUCAUGAAGAAACUGCAAC | 579 | 777 | GUUGCAGUUUCUUCAUGAA | 658 |
| 777 | CCAACAGUAAGGACUUACG | 580 | 777 | CCAACAGUAAGGACUUACG | 580 | 795 | CGUAAGUCCUUACUGUUGG | 659 |
| 795 | GUUGAAAACAGACCUAAAU | 581 | 795 | GUUGAAAACAGACCUAAAU | 581 | 813 | AUUUAGGUCUGUUUUCAAC | 660 |
| 813 | UAUGCUGGAUAUAGCUUUG | 582 | 813 | UAUGCUGGAUAUAGCUUUG | 582 | 831 | CAAAGCUAUAUCCAGCAUA | 661 |
| 831 | GAGAAACUCUUCCCUGAUG | 583 | 831 | GAGAAACUCUUCCCUGAUG | 583 | 849 | CAUCAGGGAAGAGUUUCUC | 662 |
| 849 | GUCCUUUUCCCAGCUGACU | 584 | 849 | GUCCUUUUCCCAGCUGACU | 584 | 867 | AGUCAGCUGGGAAAAGGAC | 663 |
| 867 | UCAGAACACAACAAACUUA | 585 | 867 | UCAGAACACAACAAACUUA | 585 | 885 | UAAGUUUGUUGUGUUCUGA | 664 |
| 885 | AAAGCCAGUCAGGCAAGGG | 586 | 885 | AAAGCCAGUCAGGCAAGGG | 586 | 903 | CCCUUGCCUGACUGGCUUU | 665 |
| 903 | GAUUUGUUAUCCAAAAUGC | 587 | 903 | GAUUUGUUAUCCAAAAUGC | 587 | 921 | GCAUUUUGGAUAACAAAUC | 666 |
| 921 | CUGGUAAUAGAUGCAUCUA | 588 | 921 | CUGGUAAUAGAUGCAUCUA | 588 | 939 | UAGAUGCAUCUAUUACCAG | 667 |
| 939 | AAAAGGAUCUCUGUAGAUG | 589 | 939 | AAAAGGAUCUCUGUAGAUG | 589 | 957 | CAUCUACAGAGAUCCUUUU | 668 |
| 957 | GAAGCUCUCCAACACCCGU | 590 | 957 | GAAGCUCUCCAACACCCGU | 590 | 975 | ACGGGUGUUGGAGAGCUUC | 669 |
| 975 | UACAUCAAUGUCUGGUAUG | 591 | 975 | UACAUCAAUGUCUGGUAUG | 591 | 993 | CAUACCAGACAUUGAUGUA | 670 |
| 993 | GAUCCUUCUGAAGCAGAAG | 592 | 993 | GAUCCUUCUGAAGCAGAAG | 592 | 1011 | CUUCUGCUUCAGAAGGAUC | 671 |
| 1011 | GCUCCACCACCAAAGAUCC | 593 | 1011 | GCUCCACCACCAAAGAUCC | 593 | 1029 | GGAUCUUUGGUGGUGGAGC | 672 |
| 1029 | CCUGACAAGCAGUUAGAUG | 594 | 1029 | CCUGACAAGCAGUUAGAUG | 594 | 1047 | CAUCUAACUGCUUGUCAGG | 673 |
| 1047 | GAAAGGGAACACACAAUAG | 595 | 1047 | GAAAGGGAACACACAAUAG | 595 | 1065 | CUAUUGUGUGUUCCCUUUC | 674 |
| 1065 | GAAGAGUGGAAAGAAUUGA | 596 | 1065 | GAAGAGUGGAAAGAAUUGA | 596 | 1083 | UCAAUUCUUUCCACUCUUC | 675 |
| 1083 | AUAUAUAAGGAAGUUAUGG | 597 | 1083 | AUAUAUAAGGAAGUUAUGG | 597 | 1101 | CCAUAACUUCCUUAUAUAU | 676 |
| 1101 | GACUUGGAGGAGAGAACCA | 598 | 1101 | GACUUGGAGGAGAGAACCA | 598 | 1119 | UGGUUCUCUCCUCCAAGUC | 677 |
| 1119 | AAGAAUGGAGUUAUACGGG | 599 | 1119 | AAGAAUGGAGUUAUACGGG | 599 | 1137 | CCCGUAUAACUCCAUUCUU | 678 |
| 1137 | GGGCAGCCCUCUCCUUUAG | 600 | 1137 | GGGCAGCCCUCUCCUUUAG | 600 | 1155 | CUAAAGGAGAGGGCUGCCC | 679 |
| 1155 | GCACAGGUGCAGCAGUGAU | 601 | 1155 | GCACAGGUGCAGCAGUGAU | 601 | 1173 | AUCACUGCUGCACCUGUGC | 680 |
| 1173 | UCAAUGGCUCUCAGCAUCC | 602 | 1173 | UCAAUGGCUCUCAGCAUCC | 602 | 1191 | GGAUGCUGAGAGCCAUUGA | 681 |
| 1191 | CAUCAUCAUCGUCGUCUGU | 603 | 1191 | CAUCAUCAUCGUCGUCUGU | 603 | 1209 | ACAGACGACGAUGAUGAUG | 682 |
| 1209 | UCAAUGAUGUGUCUUCAAU | 604 | 1209 | UCAAUGAUGUGUCUUCAAU | 604 | 1227 | AUUGAAGACACAUCAUUGA | 683 |
| 1227 | UGUCAACAGAUCCGACUUU | 605 | 1227 | UGUCAACAGAUCCGACUUU | 605 | 1245 | AAAGUCGGAUCUGUUGACA | 684 |
| 1245 | UGGCCUCUGAUACAGACAG | 606 | 1245 | UGGCCUCUGAUACAGACAG | 606 | 1263 | CUGUCUGUAUCAGAGGCCA | 685 |
| 1263 | GCAGUCUAGAAGCAGCAGC | 607 | 1263 | GCAGUCUAGAAGCAGCAGC | 607 | 1281 | GCUGCUGCUUCUAGACUGC | 686 |
| 1281 | CUGGGCCUCUGGGCUGCUG | 608 | 1281 | CUGGGCCUCUGGGCUGCUG | 608 | 1299 | CAGCAGCCCAGAGGCCCAG | 687 |
| 1299 | GUAGAUGACUACUUGGGCC | 609 | 1299 | GUAGAUGACUACUUGGGCC | 609 | 1317 | GGCCCAAGUAGUCAUCUAC | 688 |
| 1317 | CAUCGGGGGGUGGGAGGGA | 610 | 1317 | CAUCGGGGGGUGGGAGGGA | 610 | 1335 | UCCCUCCCACCCCCCGAUG | 689 |
| 1335 | AUGGGGAGUCGGUUAGUCA | 611 | 1335 | AUGGGGAGUCGGUUAGUCA | 611 | 1353 | UGACUAACCGACUCCCCAU | 690 |
| 1353 | AUUGAUAGAACUACUUUGA | 612 | 1353 | AUUGAUAGAACUACUUUGA | 612 | 1371 | UCAAAGUAGUUCUAUCAAU | 691 |
| 1371 | AAAACAAUUCAGUGGUCUU | 613 | 1371 | AAAACAAUUCAGUGGUCUU | 613 | 1389 | AAGACCACUGAAUUGUUUU | 692 |
| 1389 | UAUUUUUGGGUGAUUUUUC | 614 | 1389 | UAUUUUUGGGUGAUUUUUC | 614 | 1407 | GAAAAAUCACCCAAAAAUA | 693 |
| 1397 | GGUGAUUUUUCAAAAAAUG | 615 | 1397 | GGUGAUUUUUCAAAAAAUG | 615 | 1415 | CAUUUUUUGAAAAAUCACC | 694 |

MAPK14-2 NM_139012

| | | | | | | | | |
|---|---|---|---|---|---|---|---|---|
| 3 | AACCGCGACCACUGGAGCC | 695 | 3 | AACCGCGACCACUGGAGCC | 695 | 21 | GGCUCCAGUGGUCGCGGUU | 904 |
| 21 | CUUAGCGGGCGCAGCAGCU | 696 | 21 | CUUAGCGGGCGCAGCAGCU | 696 | 39 | AGCUGCUGCGCCCGCUAAG | 905 |
| 39 | UGGAACGGGAGUACUGCGA | 697 | 39 | UGGAACGGGAGUACUGCGA | 697 | 57 | UCGCAGUACUCCCGUUCCA | 906 |
| 57 | ACGCAGCCCGGAGUCGGCC | 698 | 57 | ACGCAGCCCGGAGUCGGCC | 698 | 75 | GGCCGACUCCGGGCUGCGU | 907 |
| 75 | CUUGUAGGGGCGAAGGUGC | 699 | 75 | CUUGUAGGGGCGAAGGUGC | 699 | 93 | GCACCUUCGCCCCUACAAG | 908 |
| 93 | CAGGGAGAUCGCGGCGGGC | 700 | 93 | CAGGGAGAUCGCGGCGGGC | 700 | 111 | GCCCGCCGCGAUCUCCCUG | 909 |
| 111 | CGCAGUCUUGAGCGCCGGA | 701 | 111 | CGCAGUCUUGAGCGCCGGA | 701 | 129 | UCCGGCGCUCAAGACUGCG | 910 |
| 129 | AGCGCGUCCCUGCCCUUAG | 702 | 129 | AGCGCGUCCCUGCCCUUAG | 702 | 147 | CUAAGGGCAGGGACGCGCU | 911 |
| 147 | GCGGGGCUUGCCCCAGUCG | 703 | 147 | GCGGGGCUUGCCCCAGUCG | 703 | 165 | CGACUGGGGCAAGCCCCGC | 912 |
| 165 | GCAGGGGCACAUCCAGCCG | 704 | 165 | GCAGGGGCACAUCCAGCCG | 704 | 183 | CGGCUGGAUGUGCCCCUGC | 913 |
| 183 | GCUGCGGCUGACAGCAGCC | 705 | 183 | GCUGCGGCUGACAGCAGCC | 705 | 201 | GGCUGCUGUCAGCCGCAGC | 914 |
| 201 | CGCGCGCGCGGGAGUCUGC | 706 | 201 | CGCGCGCGCGGGAGUCUGC | 706 | 219 | GCAGACUCCCGCGCGCGCG | 915 |
| 219 | CGGGGUCGCGGCAGCCGCA | 707 | 219 | CGGGGUCGCGGCAGCCGCA | 707 | 237 | UGCGGCUGCCGCGACCCCG | 916 |
| 237 | ACCUGCGCGGGCGACCAGC | 708 | 237 | ACCUGCGCGGGCGACCAGC | 708 | 255 | GCUGGUCGCCCGCGCAGGU | 917 |
| 255 | CGCAAGGUCCCCGCCCGGC | 709 | 255 | CGCAAGGUCCCCGCCCGGC | 709 | 273 | GCCGGGCGGGGACCUUGCG | 918 |
| 273 | CUGGGCGGGCAGCAAGGGC | 710 | 273 | CUGGGCGGGCAGCAAGGGC | 710 | 291 | GCCCUUGCUGCCCGCCCAG | 919 |
| 291 | CCGGGGAGAGGGUGCGGGU | 711 | 291 | CCGGGGAGAGGGUGCGGGU | 711 | 309 | ACCCGCACCCUCUCCCCGG | 920 |
| 309 | UGCAGGCGGGGGCCCCACA | 712 | 309 | UGCAGGCGGGGGCCCCACA | 712 | 327 | UGUGGGGCCCCCGCCUGCA | 921 |
| 327 | AGGGCCACCUUCUUGCCCG | 713 | 327 | AGGGCCACCUUCUUGCCCG | 713 | 345 | CGGGCAAGAAGGUGGCCCU | 922 |
| 345 | GGCGGCUGCCGCUGGAAAA | 714 | 345 | GGCGGCUGCCGCUGGAAAA | 714 | 363 | UUUUCCAGCGGCAGCCGCC | 923 |
| 363 | AUGUCUCAGGAGAGGCCCA | 715 | 363 | AUGUCUCAGGAGAGGCCCA | 715 | 381 | UGGGCCUCUCCUGAGACAU | 924 |
| 381 | ACGUUCUACCGGCAGGAGC | 716 | 381 | ACGUUCUACCGGCAGGAGC | 716 | 399 | GCUCCUGCCGGUAGAACGU | 925 |
| 399 | CUGAACAAGACAAUCUGGG | 717 | 399 | CUGAACAAGACAAUCUGGG | 717 | 417 | CCCAGAUUGUCUUGUUCAG | 926 |
| 417 | GAGGUGCCCGAGCGUUACC | 718 | 417 | GAGGUGCCCGAGCGUUACC | 718 | 435 | GGUAACGCUCGGGCACCUC | 927 |
| 435 | CAGAACCUGUCUCCAGUGG | 719 | 435 | CAGAACCUGUCUCCAGUGG | 719 | 453 | CCACUGGAGACAGGUUCUG | 928 |
| 453 | GGCUCUGGCGCCUAUGGCU | 720 | 453 | GGCUCUGGCGCCUAUGGCU | 720 | 471 | AGCCAUAGGCGCCAGAGCC | 929 |
| 471 | UCUGUGUGUGCUGCUUUUG | 721 | 471 | UCUGUGUGUGCUGCUUUUG | 721 | 489 | CAAAAGCAGCACACACAGA | 930 |
| 489 | GACACAAAAACGGGGUUAC | 722 | 489 | GACACAAAAACGGGGUUAC | 722 | 507 | GUAACCCCGUUUUUGUGUC | 931 |
| 507 | CGUGUGGCAGUGAAGAAGC | 723 | 507 | CGUGUGGCAGUGAAGAAGC | 723 | 525 | GCUUCUUCACUGCCACACG | 932 |
| 525 | CUCUCCAGACCAUUUCAGU | 724 | 525 | CUCUCCAGACCAUUUCAGU | 724 | 543 | ACUGAAAUGGUCUGGAGAG | 933 |
| 543 | UCCAUCAUUCAUGCGAAAA | 725 | 543 | UCCAUCAUUCAUGCGAAAA | 725 | 561 | UUUUCGCAUGAAUGAUGGA | 934 |
| 561 | AGAACCUACAGAGAACUGC | 726 | 561 | AGAACCUACAGAGAACUGC | 726 | 579 | GCAGUUCUCUGUAGGUUCU | 935 |
| 579 | CGGUUACUUAAACAUAUGA | 727 | 579 | CGGUUACUUAAACAUAUGA | 727 | 597 | UCAUAUGUUUAAGUAACCG | 936 |
| 597 | AAACAUGAAAAUGUGAUUG | 728 | 597 | AAACAUGAAAAUGUGAUUG | 728 | 615 | CAAUCACAUUUUCAUGUUU | 937 |
| 615 | GGUCUGUUGGACGUUUUUA | 729 | 615 | GGUCUGUUGGACGUUUUUA | 729 | 633 | UAAAAACGUCCAACAGACC | 938 |
| 633 | ACACCUGCAAGGUCUCUGG | 730 | 633 | ACACCUGCAAGGUCUCUGG | 730 | 651 | CCAGAGACCUUGCAGGUGU | 939 |
| 651 | GAGGAAUUCAAUGAUGUGU | 731 | 651 | GAGGAAUUCAAUGAUGUGU | 731 | 669 | ACACAUCAUUGAAUUCCUC | 940 |
| 669 | UAUCUGGUGACCCAUCUCA | 732 | 669 | UAUCUGGUGACCCAUCUCA | 732 | 687 | UGAGAUGGGUCACCAGAUA | 941 |
| 687 | AUGGGGGCAGAUCUGAACA | 733 | 687 | AUGGGGGCAGAUCUGAACA | 733 | 705 | UGUUCAGAUCUGCCCCCAU | 942 |
| 705 | AACAUUGUGAAAUGUCAGA | 734 | 705 | AACAUUGUGAAAUGUCAGA | 734 | 723 | UCUGACAUUUCACAAUGUU | 943 |
| 723 | AAGCUUACAGAUGACCAUG | 735 | 723 | AAGCUUACAGAUGACCAUG | 735 | 741 | CAUGGUCAUCUGUAAGCUU | 944 |
| 741 | GUUCAGUUCCUUAUCUACC | 736 | 741 | GUUCAGUUCCUUAUCUACC | 736 | 759 | GGUAGAUAAGGAACUGAAC | 945 |
| 759 | CAAAUUCUCCGAGGUCUAA | 737 | 759 | CAAAUUCUCCGAGGUCUAA | 737 | 777 | UUAGACCUCGGAGAAUUUG | 946 |
| 777 | AAGUAUAUACAUUCAGCUG | 738 | 777 | AAGUAUAUACAUUCAGCUG | 738 | 795 | CAGCUGAAUGUAUAUACUU | 947 |
| 795 | GACAUAAUUCACAGGGACC | 739 | 795 | GACAUAAUUCACAGGGACC | 739 | 813 | GGUCCCUGUGAAUUAUGUC | 948 |
| 813 | CUAAAACCUAGUAAUCUAG | 740 | 813 | CUAAAACCUAGUAAUCUAG | 740 | 831 | CUAGAUUACUAGGUUUUAG | 949 |
| 831 | GCUGUGAAUGAAGACUGUG | 741 | 831 | GCUGUGAAUGAAGACUGUG | 741 | 849 | CACAGUCUUCAUUCACAGC | 950 |
| 849 | GAGCUGAAGAUUCUGGAUU | 742 | 849 | GAGCUGAAGAUUCUGGAUU | 742 | 867 | AAUCCAGAAUCUUCAGCUC | 951 |
| 867 | UUUGGACUGGCUCGGCACA | 743 | 867 | UUUGGACUGGCUCGGCACA | 743 | 885 | UGUGCCGAGCCAGUCCAAA | 952 |
| 885 | ACAGAUGAUGAAAUGACAG | 744 | 885 | ACAGAUGAUGAAAUGACAG | 744 | 903 | CUGUCAUUUCAUCAUCUGU | 953 |
| 903 | GGCUACGUGGCCACUAGGU | 745 | 903 | GGCUACGUGGCCACUAGGU | 745 | 921 | ACCUAGUGGCCACGUAGCC | 954 |
| 921 | UGGUACAGGGCUCCUGAGA | 746 | 921 | UGGUACAGGGCUCCUGAGA | 746 | 939 | UCUCAGGAGCCCUGUACCA | 955 |
| 939 | AUCAUGCUGAACUGGAUGC | 747 | 939 | AUCAUGCUGAACUGGAUGC | 747 | 957 | GCAUCCAGUUCAGCAUGAU | 956 |
| 957 | CAUUACAACCAGACAGUUG | 748 | 957 | CAUUACAACCAGACAGUUG | 748 | 975 | CAACUGUCUGGUUGUAAUG | 957 |
| 975 | GAUAUUUGGUCAGUGGGAU | 749 | 975 | GAUAUUUGGUCAGUGGGAU | 749 | 993 | AUCCCACUGACCAAAUAUC | 958 |
| 993 | UGCAUAAUGGCCGAGCUGU | 750 | 993 | UGCAUAAUGGCCGAGCUGU | 750 | 1011 | ACAGCUCGGCCAUUAUGCA | 959 |
| 1011 | UUGACUGGAAGAACAUUGU | 751 | 1011 | UUGACUGGAAGAACAUUGU | 751 | 1029 | ACAAUGUUCUUCCAGUCAA | 960 |
| 1029 | UUUCCUGGUACAGACCAUA | 752 | 1029 | UUUCCUGGUACAGACCAUA | 752 | 1047 | UAUGGUCUGUACCAGGAAA | 961 |
| 1047 | AUUGAUCAGUUGAAGCUCA | 753 | 1047 | AUUGAUCAGUUGAAGCUCA | 753 | 1065 | UGAGCUUCAACUGAUCAAU | 962 |
| 1065 | AUUUUAAGACUCGUUGGAA | 754 | 1065 | AUUUUAAGACUCGUUGGAA | 754 | 1083 | UUCCAACGAGUCUUAAAAU | 963 |
| 1083 | ACCCCAGGGGCUGAGCUUU | 755 | 1083 | ACCCCAGGGGCUGAGCUUU | 755 | 1101 | AAAGCUCAGCCCCUGGGGU | 964 |
| 1101 | UUGAAGAAAAUCUCCUCAG | 756 | 1101 | UUGAAGAAAAUCUCCUCAG | 756 | 1119 | CUGAGGAGAUUUUCUUCAA | 965 |
| 1119 | GAGUCUGCAAGAAACUAUA | 757 | 1119 | GAGUCUGCAAGAAACUAUA | 757 | 1137 | UAUAGUUUCUUGCAGACUC | 966 |
| 1137 | AUUCAGUCUUUGACUCAGA | 758 | 1137 | AUUCAGUCUUUGACUCAGA | 758 | 1155 | UCUGAGUCAAAGACUGAAU | 967 |
| 1155 | AUGCCGAAGAUGAACUUUG | 759 | 1155 | AUGCCGAAGAUGAACUUUG | 759 | 1173 | CAAAGUUCAUCUUCGGCAU | 968 |
| 1173 | GCGAAUGUAUUUAUUGGUG | 760 | 1173 | GCGAAUGUAUUUAUUGGUG | 760 | 1191 | CACCAAUAAAUACAUUCGC | 969 |
| 1191 | GCCAAUCCCCUGGCUGUCG | 761 | 1191 | GCCAAUCCCCUGGCUGUCG | 761 | 1209 | CGACAGCCAGGGGAUUGGC | 970 |
| 1209 | GACUUGCUGGAGAAGAUGC | 762 | 1209 | GACUUGCUGGAGAAGAUGC | 762 | 1227 | GCAUCUUCUCCAGCAAGUC | 971 |
| 1227 | CUUGUAUUGGACUCAGAUA | 763 | 1227 | CUUGUAUUGGACUCAGAUA | 763 | 1245 | UAUCUGAGUCCAAUACAAG | 972 |
| 1245 | AAGAGAAUUACAGCGGCCC | 764 | 1245 | AAGAGAAUUACAGCGGCCC | 764 | 1263 | GGGCCGCUGUAAUUCUCUU | 973 |
| 1263 | CAAGCCCUUGCACAUGCCU | 765 | 1263 | CAAGCCCUUGCACAUGCCU | 765 | 1281 | AGGCAUGUGCAAGGGCUUG | 974 |
| 1281 | UACUUUGCUCAGUACCACG | 766 | 1281 | UACUUUGCUCAGUACCACG | 766 | 1299 | CGUGGUACUGAGCAAAGUA | 975 |
| 1299 | GAUCCUGAUGAUGAACCAG | 767 | 1299 | GAUCCUGAUGAUGAACCAG | 767 | 1317 | CUGGUUCAUCAUCAGGAUC | 976 |
| 1317 | GUGGCCGAUCCUUAUGAUC | 768 | 1317 | GUGGCCGAUCCUUAUGAUC | 768 | 1335 | GAUCAUAAGGAUCGGCCAC | 977 |
| 1335 | CAGUCCUUUGAAAGCAGGG | 769 | 1335 | CAGUCCUUUGAAAGCAGGG | 769 | 1353 | CCCUGCUUUCAAAGGACUG | 978 |
| 1353 | GACCUCCUUAUAGAUGAGU | 770 | 1353 | GACCUCCUUAUAGAUGAGU | 770 | 1371 | ACUCAUCUAUAAGGAGGUC | 979 |
| 1371 | UGGAAAAGCCUGACCUAUG | 771 | 1371 | UGGAAAAGCCUGACCUAUG | 771 | 1389 | CAUAGGUCAGGCUUUUCCA | 980 |
| 1389 | GAUGAAGUCAUCAGCUUUG | 772 | 1389 | GAUGAAGUCAUCAGCUUUG | 772 | 1407 | CAAAGCUGAUGACUUCAUC | 981 |
| 1407 | GUGCCACCACCCCUUGACC | 773 | 1407 | GUGCCACCACCCCUUGACC | 773 | 1425 | GGUCAAGGGGUGGUGGCAC | 982 |
| 1425 | CAAGAAGAGAUGGAGUCCU | 774 | 1425 | CAAGAAGAGAUGGAGUCCU | 774 | 1443 | AGGACUCCAUCUCUUCUUG | 983 |
| 1443 | UGAGCACCUGGUUUCUGUU | 775 | 1443 | UGAGCACCUGGUUUCUGUU | 775 | 1461 | AACAGAAACCAGGUGCUCA | 984 |
| 1461 | UCUGUUGAUCCCACUUCAC | 776 | 1461 | UCUGUUGAUCCCACUUCAC | 776 | 1479 | GUGAAGUGGGAUCAACAGA | 985 |
| 1479 | CUGUGAGGGGAAGGCCUUU | 777 | 1479 | CUGUGAGGGGAAGGCCUUU | 777 | 1497 | AAAGGCCUUCCCCUCACAG | 986 |
| 1497 | UUCACGGGAACUCUCCAAA | 778 | 1497 | UUCACGGGAACUCUCCAAA | 778 | 1515 | UUUGGAGAGUUCCCGUGAA | 987 |
| 1515 | AUAUUAUUCAAGUGCCUCU | 779 | 1515 | AUAUUAUUCAAGUGCCUCU | 779 | 1533 | AGAGGCACUUGAAUAAUAU | 988 |
| 1533 | UUGUUGCAGAGAUUUCCUC | 780 | 1533 | UUGUUGCAGAGAUUUCCUC | 780 | 1551 | GAGGAAAUCUCUGCAACAA | 989 |
| 1551 | CCAUGGUGGAAGGGGGUGU | 781 | 1551 | CCAUGGUGGAAGGGGGUGU | 781 | 1569 | ACACCCCCUUCCACCAUGG | 990 |
| 1569 | UGCGUGCGUGUGCGUGCGU | 782 | 1569 | UGCGUGCGUGUGCGUGCGU | 782 | 1587 | ACGCACGCACACGCACGCA | 991 |
| 1587 | UGUUAGUGUGUGUGCAUGU | 783 | 1587 | UGUUAGUGUGUGUGCAUGU | 783 | 1605 | ACAUGCACACACACUAACA | 992 |
| 1605 | UGUGUGUCUGUCUUUGUGG | 784 | 1605 | UGUGUGUCUGUCUUUGUGG | 784 | 1623 | CCACAAAGACAGACACACA | 993 |
| 1623 | GGAGGGUAAGACAAUAUGA | 785 | 1623 | GGAGGGUAAGACAAUAUGA | 785 | 1641 | UCAUAUUGUCUUACCCUCC | 994 |
| 1641 | AACAAACUAUGAUCACAGU | 786 | 1641 | AACAAACUAUGAUCACAGU | 786 | 1659 | ACUGUGAUCAUAGUUUGUU | 995 |
| 1659 | UGACUUUACAGGAGGUUGU | 787 | 1659 | UGACUUUACAGGAGGUUGU | 787 | 1677 | ACAACCUCCUGUAAAGUCA | 996 |
| 1677 | UGGAUGCUCCAGGGCAGCC | 788 | 1677 | UGGAUGCUCCAGGGCAGCC | 788 | 1695 | GGCUGCCCUGGAGCAUCCA | 997 |
| 1695 | CUCCACCUUGCUCUUCUUU | 789 | 1695 | CUCCACCUUGCUCUUCUUU | 789 | 1713 | AAAGAAGAGCAAGGUGGAG | 998 |
| 1713 | UCUGAGAGUUGGCUCAGGC | 790 | 1713 | UCUGAGAGUUGGCUCAGGC | 790 | 1731 | GCCUGAGCCAACUCUCAGA | 999 |
| 1731 | CAGACAAGAGCUGCUGUCC | 791 | 1731 | CAGACAAGAGCUGCUGUCC | 791 | 1749 | GGACAGCAGCUCUUGUCUG | 1000 |
| 1749 | CUUUUAGGAAUAUGUUCAA | 792 | 1749 | CUUUUAGGAAUAUGUUCAA | 792 | 1767 | UUGAACAUAUUCCUAAAAG | 1001 |
| 1767 | AUGCAAAGUAAAAAAAUAU | 793 | 1767 | AUGCAAAGUAAAAAAAUAU | 793 | 1785 | AUAUUUUUUUACUUUGCAU | 1002 |
| 1785 | UGAAUUGUCCCCAAUCCCG | 794 | 1785 | UGAAUUGUCCCCAAUCCCG | 794 | 1803 | CGGGAUUGGGGACAAUUCA | 1003 |
| 1803 | GGUCAUGCUUUUGCCACUU | 795 | 1803 | GGUCAUGCUUUUGCCACUU | 795 | 1821 | AAGUGGCAAAAGCAUGACC | 1004 |
| 1821 | UUGGCUUCUCCUGUGACCC | 796 | 1821 | UUGGCUUCUCCUGUGACCC | 796 | 1839 | GGGUCACAGGAGAAGCCAA | 1005 |
| 1839 | CCACCUUGACGGUGGGGCG | 797 | 1839 | CCACCUUGACGGUGGGGCG | 797 | 1857 | CGCCCCACCGUCAAGGUGG | 1006 |
| 1857 | GUAGACUUGACAACAUCCC | 798 | 1857 | GUAGACUUGACAACAUCCC | 798 | 1875 | GGGAUGUUGUCAAGUCUAC | 1007 |
| 1875 | CACAGUGGCACGGAGAGAA | 799 | 1875 | CACAGUGGCACGGAGAGAA | 799 | 1893 | UUCUCUCCGUGCCACUGUG | 1008 |
| 1893 | AGGCCCAUACCUUCUGGUU | 800 | 1893 | AGGCCCAUACCUUCUGGUU | 800 | 1911 | AACCAGAAGGUAUGGGCCU | 1009 |
| 1911 | UGCUUCAGACCUGACACCG | 801 | 1911 | UGCUUCAGACCUGACACCG | 801 | 1929 | CGGUGUCAGGUCUGAAGCA | 1010 |
| 1929 | GUCCCUCAGUGAUACGUAC | 802 | 1929 | GUCCCUCAGUGAUACGUAC | 802 | 1947 | GUACGUAUCACUGAGGGAC | 1011 |
| 1947 | CAGCCAAAAAGGACCAACU | 803 | 1947 | CAGCCAAAAAGGACCAACU | 803 | 1965 | AGUUGGUCCUUUUUGGCUG | 1012 |
| 1965 | UGGCUUCUGUGCACUAGCC | 804 | 1965 | UGGCUUCUGUGCACUAGCC | 804 | 1983 | GGCUAGUGCACAGAAGCCA | 1013 |
| 1983 | CUGUGAUUAACUUGCUUAG | 805 | 1983 | CUGUGAUUAACUUGCUUAG | 805 | 2001 | CUAAGCAAGUUAAUCACAG | 1014 |
| 2001 | GUAUGGUUCUCAGAUCUUG | 806 | 2001 | GUAUGGUUCUCAGAUCUUG | 806 | 2019 | CAAGAUCUGAGAACCAUAC | 1015 |
| 2019 | GACAGUAUAUUUGAAACUG | 807 | 2019 | GACAGUAUAUUUGAAACUG | 807 | 2037 | CAGUUUCAAAUAUACUGUC | 1016 |
| 2037 | GUAAAUAUGUUUGUGCCUU | 808 | 2037 | GUAAAUAUGUUUGUGCCUU | 808 | 2055 | AAGGCACAAACAUAUUUAC | 1017 |
| 2055 | UAAAAGGAGAGAAGAAAGU | 809 | 2055 | UAAAAGGAGAGAAGAAAGU | 809 | 2073 | ACUUUCUUCUCUCCUUUUA | 1018 |
| 2073 | UGUAGAUAGUUAAAAGACU | 810 | 2073 | UGUAGAUAGUUAAAAGACU | 810 | 2091 | AGUCUUUUAACUAUCUACA | 1019 |
| 2091 | UGCAGCUGCUGAAGUUCUG | 811 | 2091 | UGCAGCUGCUGAAGUUCUG | 811 | 2109 | CAGAACUUCAGCAGCUGCA | 1020 |
| 2109 | GAGCCGGGCAAGUCGAGAG | 812 | 2109 | GAGCCGGGCAAGUCGAGAG | 812 | 2127 | CUCUCGACUUGCCCGGCUC | 1021 |
| 2127 | GGGCUGUUGGACAGCUGCU | 813 | 2127 | GGGCUGUUGGACAGCUGCU | 813 | 2145 | AGCAGCUGUCCAACAGCCC | 1022 |
| 2145 | UUGUGGGCCCGGAGUAAUC | 814 | 2145 | UUGUGGGCCCGGAGUAAUC | 814 | 2163 | GAUUACUCCGGGCCCACAA | 1023 |
| 2163 | CAGGCAGCCUUCAUAGGCG | 815 | 2163 | CAGGCAGCCUUCAUAGGCG | 815 | 2181 | CGCCUAUGAAGGCUGCCUG | 1024 |
| 2181 | GGUCAUGUGUGCAUGUGAG | 816 | 2181 | GGUCAUGUGUGCAUGUGAG | 816 | 2199 | CUCACAUGCACACAUGACC | 1025 |
| 2199 | GCACAUGCGUAUAUGUGCG | 817 | 2199 | GCACAUGCGUAUAUGUGCG | 817 | 2217 | CGCACAUAUACGCAUGUGC | 1026 |
| 2217 | GUCUCUCUUUCUCCCUCAC | 818 | 2217 | GUCUCUCUUUCUCCCUCAC | 818 | 2235 | GUGAGGGAGAAAGAGAGAC | 1027 |
| 2235 | CCCCCAGGUGUUGCCAUUU | 819 | 2235 | CCCCCAGGUGUUGCCAUUU | 819 | 2253 | AAAUGGCAACACCUGGGGG | 1028 |
| 2253 | UCUCUGCUUACCCUUCACC | 820 | 2253 | UCUCUGCUUACCCUUCACC | 820 | 2271 | GGUGAAGGGUAAGCAGAGA | 1029 |
| 2271 | CUUUGGUGCAGAGGUUUCU | 821 | 2271 | CUUUGGUGCAGAGGUUUCU | 821 | 2289 | AGAAACCUCUGCACCAAAG | 1030 |
| 2289 | UUGAAUAUCUGCCCCAGUA | 822 | 2289 | UUGAAUAUCUGCCCCAGUA | 822 | 2307 | UACUGGGGCAGAUAUUCAA | 1031 |
| 2307 | AGUCAGAAGCAGGUUCUUG | 823 | 2307 | AGUCAGAAGCAGGUUCUUG | 823 | 2325 | CAAGAACCUGCUUCUGACU | 1032 |
| 2325 | GAUGUCAUGUACUUCCUGU | 824 | 2325 | GAUGUCAUGUACUUCCUGU | 824 | 2343 | ACAGGAAGUACAUGACAUC | 1033 |
| 2343 | UGUACUCUUUAUUUCUAGC | 825 | 2343 | UGUACUCUUUAUUUCUAGC | 825 | 2361 | GCUAGAAAUAAAGAGUACA | 1034 |
| 2361 | CAGAGUGAGGAUGUGUUUU | 826 | 2361 | CAGAGUGAGGAUGUGUUUU | 826 | 2379 | AAAACACAUCCUCACUCUG | 1035 |
| 2379 | UGCACGUCUUGCUAUUUGA | 827 | 2379 | UGCACGUCUUGCUAUUUGA | 827 | 2397 | UCAAAUAGCAAGACGUGCA | 1036 |
| 2397 | AGCAUGCACAGCUGCUUGU | 828 | 2397 | AGCAUGCACAGCUGCUUGU | 828 | 2415 | ACAAGCAGCUGUGCAUGCU | 1037 |
| 2415 | UCCUGCUCUCUUCAGGAGG | 829 | 2415 | UCCUGCUCUCUUCAGGAGG | 829 | 2433 | CCUCCUGAAGAGAGCAGGA | 1038 |
| 2433 | GCCCUGGUGUCAGGCAGGU | 830 | 2433 | GCCCUGGUGUCAGGCAGGU | 830 | 2451 | ACCUGCCUGACACCAGGGC | 1039 |
| 2451 | UUUGCCAGUGAAGACUUCU | 831 | 2451 | UUUGCCAGUGAAGACUUCU | 831 | 2469 | AGAAGUCUUCACUGGCAAA | 1040 |
| 2469 | UUGGGUAGUUUAGAUCCCA | 832 | 2469 | UUGGGUAGUUUAGAUCCCA | 832 | 2487 | UGGGAUCUAAACUACCCAA | 1041 |
| 2487 | AUGUCACCUCAGCUGAUAU | 833 | 2487 | AUGUCACCUCAGCUGAUAU | 833 | 2505 | AUAUCAGCUGAGGUGACAU | 1042 |
| 2505 | UUAUGGCAAGUGAUAUCAC | 834 | 2505 | UUAUGGCAAGUGAUAUCAC | 834 | 2523 | GUGAUAUCACUUGCCAUAA | 1043 |
| 2523 | CCUCUCUUCAGCCCCUAGU | 835 | 2523 | CCUCUCUUCAGCCCCUAGU | 835 | 2541 | ACUAGGGGCUGAAGAGAGG | 1044 |
| 2541 | UGCUAUUCUGUGUUGAACA | 836 | 2541 | UGCUAUUCUGUGUUGAACA | 836 | 2559 | UGUUCAACACAGAAUAGCA | 1045 |
| 2559 | ACAAUUGAUACUUCAGGUG | 837 | 2559 | ACAAUUGAUACUUCAGGUG | 837 | 2577 | CACCUGAAGUAUCAAUUGU | 1046 |
| 2577 | GCUUUUGAUGUGAAAAUCA | 838 | 2577 | GCUUUUGAUGUGAAAAUCA | 838 | 2595 | UGAUUUUCACAUCAAAAGC | 1047 |
| 2595 | AUGAAAAGAGGAACAGGUG | 839 | 2595 | AUGAAAAGAGGAACAGGUG | 839 | 2613 | CACCUGUUCCUCUUUUCAU | 1048 |
| 2613 | GGAUGUAUAGCAUUUUUAU | 840 | 2613 | GGAUGUAUAGCAUUUUUAU | 840 | 2631 | AUAAAAAUGCUAUACAUCC | 1049 |
| 2631 | UUCAUGCCAUCUGUUUUCA | 841 | 2631 | UUCAUGCCAUCUGUUUUCA | 841 | 2649 | UGAAAACAGAUGGCAUGAA | 1050 |
| 2649 | AACCAACUAUUUUUGAGGA | 842 | 2649 | AACCAACUAUUUUUGAGGA | 842 | 2667 | UCCUCAAAAAUAGUUGGUU | 1051 |
| 2667 | AAUUAUCAUGGGAAAAGAC | 843 | 2667 | AAUUAUCAUGGGAAAAGAC | 843 | 2685 | GUCUUUUCCCAUGAUAAUU | 1052 |
| 2685 | CCAGGGCUUUUCCCAGGAA | 844 | 2685 | CCAGGGCUUUUCCCAGGAA | 844 | 2703 | UUCCUGGGAAAAGCCCUGG | 1053 |
| 2703 | AUAUCCCAAACUUCGGAAA | 845 | 2703 | AUAUCCCAAACUUCGGAAA | 845 | 2721 | UUUCCGAAGUUUGGGAUAU | 1054 |
| 2721 | ACAAGUUAUUCUCUUCACU | 846 | 2721 | ACAAGUUAUUCUCUUCACU | 846 | 2739 | AGUGAAGAGAAUAACUUGU | 1055 |
| 2739 | UCCCAAUAACUAAUGCUAA | 847 | 2739 | UCCCAAUAACUAAUGCUAA | 847 | 2757 | UUAGCAUUAGUUAUUGGGA | 1056 |
| 2757 | AGAAAUGCUGAAAAUCAAA | 848 | 2757 | AGAAAUGCUGAAAAUCAAA | 848 | 2775 | UUUGAUUUUCAGCAUUUCU | 1057 |
| 2775 | AGUAAAAAAUUAAAGCCCA | 849 | 2775 | AGUAAAAAAUUAAAGCCCA | 849 | 2793 | UGGGCUUUAAUUUUUUACU | 1058 |
| 2793 | AUAAGGCCAGAAACUCCUU | 850 | 2793 | AUAAGGCCAGAAACUCCUU | 850 | 2811 | AAGGAGUUUCUGGCCUUAU | 1059 |
| 2811 | UUUGCUGUCUUUCUCUAAA | 851 | 2811 | UUUGCUGUCUUUCUCUAAA | 851 | 2829 | UUUAGAGAAAGACAGCAAA | 1060 |
| 2829 | AUAUGAUUACUUUAAAAUA | 852 | 2829 | AUAUGAUUACUUUAAAAUA | 852 | 2847 | UAUUUUAAAGUAAUCAUAU | 1061 |
| 2847 | AAAAAAGUAACAAGGUGUC | 853 | 2847 | AAAAAAGUAACAAGGUGUC | 853 | 2865 | GACACCUUGUUACUUUUUU | 1062 |
| 2865 | CUUUUCCACUCCUAUGGAA | 854 | 2865 | CUUUUCCACUCCUAUGGAA | 854 | 2883 | UUCCAUAGGAGUGGAAAAG | 1063 |
| 2883 | AAAGGGUCUUCUUGGCAGC | 855 | 2883 | AAAGGGUCUUCUUGGCAGC | 855 | 2901 | GCUGCCAAGAAGACCCUUU | 1064 |
| 2901 | CUUAACAUUGACUUCUUGG | 856 | 2901 | CUUAACAUUGACUUCUUGG | 856 | 2919 | CCAAGAAGUCAAUGUUAAG | 1065 |
| 2919 | GUUUGGGGAGAAAUAAAUU | 857 | 2919 | GUUUGGGGAGAAAUAAAUU | 857 | 2937 | AAUUUAUUUCUCCCCAAAC | 1066 |
| 2937 | UUUGUUUCAGAAUUUUGUA | 858 | 2937 | UUUGUUUCAGAAUUUUGUA | 858 | 2955 | UACAAAAUUCUGAAACAAA | 1067 |
| 2955 | AUAUUGUAGGAAUCCCUUU | 859 | 2955 | AUAUUGUAGGAAUCCCUUU | 859 | 2973 | AAAGGGAUUCCUACAAUAU | 1068 |
| 2973 | UGAGAAUGUGAUUCCUUUU | 860 | 2973 | UGAGAAUGUGAUUCCUUUU | 860 | 2991 | AAAAGGAAUCACAUUCUCA | 1069 |
| 2991 | UGAUGGGGAGAAAGGGCAA | 861 | 2991 | UGAUGGGGAGAAAGGGCAA | 861 | 3009 | UUGCCCUUUCUCCCCAUCA | 1070 |
| 3009 | AAUUAUUUUAAUAUUUUGU | 862 | 3009 | AAUUAUUUUAAUAUUUUGU | 862 | 3027 | ACAAAAUAUUAAAAUAAUU | 1071 |
| 3027 | UAUUUUCAACUUUAUAAAG | 863 | 3027 | UAUUUUCAACUUUAUAAAG | 863 | 3045 | CUUUAUAAAGUUGAAAAUA | 1072 |
| 3045 | GAUAAAAUAUCCUCAGGGG | 864 | 3045 | GAUAAAAUAUCCUCAGGGG | 864 | 3063 | CCCCUGAGGAUAUUUUAUC | 1073 |
| 3063 | GUGGAGAAGUGUCGUUUUC | 865 | 3063 | GUGGAGAAGUGUCGUUUUC | 865 | 3081 | GAAAACGACACUUCUCCAC | 1074 |
| 3081 | CAUAACUUGCUGAAUUUCA | 866 | 3081 | CAUAACUUGCUGAAUUUCA | 866 | 3099 | UGAAAUUCAGCAAGUUAUG | 1075 |
| 3099 | AGGCAUUUUGUUCUACAUG | 867 | 3099 | AGGCAUUUUGUUCUACAUG | 867 | 3117 | CAUGUAGAACAAAAUGCCU | 1076 |
| 3117 | GAGGACUCAUAUAUUUAAG | 868 | 3117 | GAGGACUCAUAUAUUUAAG | 868 | 3135 | CUUAAAUAUAUGAGUCCUC | 1077 |
| 3135 | GCCUUUUGUGUAAUAAGAA | 869 | 3135 | GCCUUUUGUGUAAUAAGAA | 869 | 3153 | UUCUUAUUACACAAAAGGC | 1078 |
| 3153 | AAGUAUAAAGUCACUUCCA | 870 | 3153 | AAGUAUAAAGUCACUUCCA | 870 | 3171 | UGGAAGUGACUUUAUACUU | 1079 |
| 3171 | AGUGUUGGCUGUGUGACAG | 871 | 3171 | AGUGUUGGCUGUGUGACAG | 871 | 3189 | CUGUCACACAGCCAACACU | 1080 |
| 3189 | GAAUCUUGUAUUUGGGCCA | 872 | 3189 | GAAUCUUGUAUUUGGGCCA | 872 | 3207 | UGGCCCAAAUACAAGAUUC | 1081 |
| 3207 | AAGGUGUUUCCAUUUCUCA | 873 | 3207 | AAGGUGUUUCCAUUUCUCA | 873 | 3225 | UGAGAAAUGGAAACACCUU | 1082 |
| 3225 | AAUCAGUGCAGUGAUACAU | 874 | 3225 | AAUCAGUGCAGUGAUACAU | 874 | 3243 | AUGUAUCACUGCACUGAUU | 1083 |
| 3243 | UGUACUCCAGAGGGACAGG | 875 | 3243 | UGUACUCCAGAGGGACAGG | 875 | 3261 | CCUGUCCCUCUGGAGUACA | 1084 |
| 3261 | GGUGGACCCCCUGAGUCAA | 876 | 3261 | GGUGGACCCCCUGAGUCAA | 876 | 3279 | UUGACUCAGGGGGUCCACC | 1085 |
| 3279 | ACUGGAGCAAGAAGGAAGG | 877 | 3279 | ACUGGAGCAAGAAGGAAGG | 877 | 3297 | CCUUCCUUCUUGCUCCAGU | 1086 |
| 3297 | GAGGCAGACUGAUGGCGAU | 878 | 3297 | GAGGCAGACUGAUGGCGAU | 878 | 3315 | AUCGCCAUCAGUCUGCCUC | 1087 |
| 3315 | UUCCCUCUCACCCGGGACU | 879 | 3315 | UUCCCUCUCACCCGGGACU | 879 | 3333 | AGUCCCGGGUGAGAGGGAA | 1088 |
| 3333 | UCUCCCCCUUUCAAGGAAA | 880 | 3333 | UCUCCCCCUUUCAAGGAAA | 880 | 3351 | UUUCCUUGAAAGGGGGAGA | 1089 |
| 3351 | AGUGAACCUUUAAAGUAAA | 881 | 3351 | AGUGAACCUUUAAAGUAAA | 881 | 3369 | UUUACUUUAAAGGUUCACU | 1090 |
| 3369 | AGGCCUCAUCUCCUUUAUU | 882 | 3369 | AGGCCUCAUCUCCUUUAUU | 882 | 3387 | AAUAAAGGAGAUGAGGCCU | 1091 |
| 3387 | UGCAGUUCAAAUCCUCACC | 883 | 3387 | UGCAGUUCAAAUCCUCACC | 883 | 3405 | GGUGAGGAUUUGAACUGCA | 1092 |
| 3405 | CAUCCACAGCAAGAUGAAU | 884 | 3405 | CAUCCACAGCAAGAUGAAU | 884 | 3423 | AUUCAUCUUGCUGUGGAUG | 1093 |
| 3423 | UUUUAUCAGCCAUGUUUGG | 885 | 3423 | UUUUAUCAGCCAUGUUUGG | 885 | 3441 | CCAAACAUGGCUGAUAAAA | 1094 |
| 3441 | GUUGUAAAUGCUCGUGUGA | 886 | 3441 | GUUGUAAAUGCUCGUGUGA | 886 | 3459 | UCACACGAGCAUUUACAAC | 1095 |
| 3459 | AUUUCCUACAGAAAUACUG | 887 | 3459 | AUUUCCUACAGAAAUACUG | 887 | 3477 | CAGUAUUUCUGUAGGAAAU | 1096 |
| 3477 | GCUCUGAAUAUUUUGUAAU | 888 | 3477 | GCUCUGAAUAUUUUGUAAU | 888 | 3495 | AUUACAAAAUAUUCAGAGC | 1097 |
| 3495 | UAAAGGUCUUUGCACAUGU | 889 | 3495 | UAAAGGUCUUUGCACAUGU | 889 | 3513 | ACAUGUGCAAAGACCUUUA | 1098 |
| 3513 | UGACCACAUACGUGUUAGG | 890 | 3513 | UGACCACAUACGUGUUAGG | 890 | 3531 | CCUAACACGUAUGUGGUCA | 1099 |
| 3531 | GAGGCUGCAUGCUCUGGAA | 891 | 3531 | GAGGCUGCAUGCUCUGGAA | 891 | 3549 | UUCCAGAGCAUGCAGCCUC | 1100 |
| 3549 | AGCCUGGACUCUAAGCUGG | 892 | 3549 | AGCCUGGACUCUAAGCUGG | 892 | 3567 | CCAGCUUAGAGUCCAGGCU | 1101 |
| 3567 | GAGCUCUUGGAAGAGCUCU | 893 | 3567 | GAGCUCUUGGAAGAGCUCU | 893 | 3585 | AGAGCUCUUCCAAGAGCUC | 1102 |
| 3585 | UUCGGUUUCUGAGCAUAAU | 894 | 3585 | UUCGGUUUCUGAGCAUAAU | 894 | 3603 | AUUAUGCUCAGAAACCGAA | 1103 |
| 3603 | UGCUCCCAUCUCCUGAUUU | 895 | 3603 | UGCUCCCAUCUCCUGAUUU | 895 | 3621 | AAAUCAGGAGAUGGGAGCA | 1104 |
| 3621 | UCUCUGAACAGAAAACAAA | 896 | 3621 | UCUCUGAACAGAAAACAAA | 896 | 3639 | UUUGUUUUCUGUUCAGAGA | 1105 |
| 3639 | AAGAGAGAAUGAGGGAAAU | 897 | 3639 | AAGAGAGAAUGAGGGAAAU | 897 | 3657 | AUUUCCCUCAUUCUCUCUU | 1106 |
| 3657 | UUGCUAUUUUAUUUGUAUU | 898 | 3657 | UUGCUAUUUUAUUUGUAUU | 898 | 3675 | AAUACAAAUAAAAUAGCAA | 1107 |
| 3675 | UCAUGAACUUGGCUGUAAU | 899 | 3675 | UCAUGAACUUGGCUGUAAU | 899 | 3693 | AUUACAGCCAAGUUCAUGA | 1108 |
| 3693 | UCAGUUAUGCCGUAUAGGA | 900 | 3693 | UCAGUUAUGCCGUAUAGGA | 900 | 3711 | UCCUAUACGGCAUAACUGA | 1109 |
| 3711 | AUGUCAGACAAUACCACUG | 901 | 3711 | AUGUCAGACAAUACCACUG | 901 | 3729 | CAGUGGUAUUGUCUGACAU | 1110 |
| 3729 | GGUUAAAAUAAAGCCUAUU | 902 | 3729 | GGUUAAAAUAAAGCCUAUU | 902 | 3747 | AAUAGGCUUUAUUUUAACC | 1111 |
| 3737 | UAAAGCCUAUUUUUCAAAU | 903 | 3737 | UAAAGCCUAUUUUUCAAAU | 903 | 3755 | AUUUGAAAAAUAGGCUUUA | 1112 |

JUN NM_002228

| | | | | | | | | |
|---|---|---|---|---|---|---|---|---|
| 3 | AGUUGCACUGAGUGUGGCU | 1113 | 3 | AGUUGCACUGAGUGUGGCU | 1113 | 21 | AGCCACACUCAGUGCAACU | 1294 |
| 21 | UGAAGCAGCGAGGCGGGAG | 1114 | 21 | UGAAGCAGCGAGGCGGGAG | 1114 | 39 | CUCCCGCCUCGCUGCUUCA | 1295 |
| 39 | GUGGAGGUGCGCGGAGUCA | 1115 | 39 | GUGGAGGUGCGCGGAGUCA | 1115 | 57 | UGACUCCGCGCACCUCCAC | 1296 |
| 57 | AGGCAGACAGACAGACACA | 1116 | 57 | AGGCAGACAGACAGACACA | 1116 | 75 | UGUGUCUGUCUGUCUGCCU | 1297 |
| 75 | AGCCAGCCAGCCAGGUCGG | 1117 | 75 | AGCCAGCCAGCCAGGUCGG | 1117 | 93 | CCGACCUGGCUGGCUGGCU | 1298 |
| 93 | GCAGUAUAGUCCGAACUGC | 1118 | 93 | GCAGUAUAGUCCGAACUGC | 1118 | 111 | GCAGUUCGGACUAUACUGC | 1299 |
| 111 | CAAAUCUUAUUUUCUUUUC | 1119 | 111 | CAAAUCUUAUUUUCUUUUC | 1119 | 129 | GAAAAGAAAAUAAGAUUUG | 1300 |
| 129 | CACCUUCUCUCUAACUGCC | 1120 | 129 | CACCUUCUCUCUAACUGCC | 1120 | 147 | GGCAGUUAGAGAGAAGGUG | 1301 |
| 147 | CCAGAGCUAGCGCCUGUGG | 1121 | 147 | CCAGAGCUAGCGCCUGUGG | 1121 | 165 | CCACAGGCGCUAGCUCUGG | 1302 |
| 165 | GCUCCCGGGCUGGUGGUUC | 1122 | 165 | GCUCCCGGGCUGGUGGUUC | 1122 | 183 | GAACCACCAGCCCGGGAGC | 1303 |
| 183 | CGGGAGUGUCCAGAGAGCC | 1123 | 183 | CGGGAGUGUCCAGAGAGCC | 1123 | 201 | GGCUCUCUGGACACUCCCG | 1304 |
| 201 | CUUGUCUCCAGCCGGCCCC | 1124 | 201 | CUUGUCUCCAGCCGGCCCC | 1124 | 219 | GGGGCCGGCUGGAGACAAG | 1305 |
| 219 | CGGGAGGAGAGCCCUGCUG | 1125 | 219 | CGGGAGGAGAGCCCUGCUG | 1125 | 237 | CAGCAGGGCUCUCCUCCCG | 1306 |
| 237 | GCCCAGGCGCUGUUGACAG | 1126 | 237 | GCCCAGGCGCUGUUGACAG | 1126 | 255 | CUGUCAACAGCGCCUGGGC | 1307 |
| 255 | GCGGCGGAAAGCAGCGGUA | 1127 | 255 | GCGGCGGAAAGCAGCGGUA | 1127 | 273 | UACCGCUGCUUUCCGCCGC | 1308 |
| 273 | ACCCCACGCGCCCGCCGGG | 1128 | 273 | ACCCCACGCGCCCGCCGGG | 1128 | 291 | CCCGGCGGGCGCGUGGGGU | 1309 |
| 291 | GGGACGUCGGCGAGCGGCU | 1129 | 291 | GGGACGUCGGCGAGCGGCU | 1129 | 309 | AGCCGCUCGCCGACGUCCC | 1310 |
| 309 | UGCAGCAGCAAAGAACUUU | 1130 | 309 | UGCAGCAGCAAAGAACUUU | 1130 | 327 | AAAGUUCUUUGCUGCUGCA | 1311 |
| 327 | UCCCGGCGGGGAGGACCGG | 1131 | 327 | UCCCGGCGGGGAGGACCGG | 1131 | 345 | CCGGUCCUCCCCGCCGGGA | 1312 |
| 345 | GAGACAAGUGGCAGAGUCC | 1132 | 345 | GAGACAAGUGGCAGAGUCC | 1132 | 363 | GGACUCUGCCACUUGUCUC | 1313 |
| 363 | CCGGAGCGAACUUUUGCAA | 1133 | 363 | CCGGAGCGAACUUUUGCAA | 1133 | 381 | UUGCAAAAGUUCGCUCCGG | 1314 |
| 381 | AGCCUUUCCUGCGUCUUAG | 1134 | 381 | AGCCUUUCCUGCGUCUUAG | 1134 | 399 | CUAAGACGCAGGAAAGGCU | 1315 |
| 399 | GGCUUCUCCACGGCGGUAA | 1135 | 399 | GGCUUCUCCACGGCGGUAA | 1135 | 417 | UUACCGCCGUGGAGAAGCC | 1316 |
| 417 | AAGACCAGAAGGCGGCGGA | 1136 | 417 | AAGACCAGAAGGCGGCGGA | 1136 | 435 | UCCGCCGCCUUCUGGUCUU | 1317 |
| 435 | AGAGCCACGCAAGAGAAGA | 1137 | 435 | AGAGCCACGCAAGAGAAGA | 1137 | 453 | UCUUCUCUUGCGUGGCUCU | 1318 |
| 453 | AAGGACGUGCGCUCAGCUU | 1138 | 453 | AAGGACGUGCGCUCAGCUU | 1138 | 471 | AAGCUGAGCGCACGUCCUU | 1319 |
| 471 | UCGCUCGCACCGGUUGUUG | 1139 | 471 | UCGCUCGCACCGGUUGUUG | 1139 | 489 | CAACAACCGGUGCGAGCGA | 1320 |
| 489 | GAACUUGGGCGAGCGCGAG | 1140 | 489 | GAACUUGGGCGAGCGCGAG | 1140 | 507 | CUCGCGCUCGCCCAAGUUC | 1321 |
| 507 | GCCGCGGCUGCCGGGCGCC | 1141 | 507 | GCCGCGGCUGCCGGGCGCC | 1141 | 525 | GGCGCCCGGCAGCCGCGGC | 1322 |
| 525 | CCCCUCCCCCUAGCAGCGG | 1142 | 525 | CCCCUCCCCCUAGCAGCGG | 1142 | 543 | CCGCUGCUAGGGGGAGGGG | 1323 |
| 543 | GAGGAGGGGACAAGUCGUC | 1143 | 543 | GAGGAGGGGACAAGUCGUC | 1143 | 561 | GACGACUUGUCCCCUCCUC | 1324 |
| 561 | CGGAGUCCGGGCGGCCAAG | 1144 | 561 | CGGAGUCCGGGCGGCCAAG | 1144 | 579 | CUUGGCCGCCCGGACUCCG | 1325 |
| 579 | GACCCGCCGCCGGCCGGCC | 1145 | 579 | GACCCGCCGCCGGCCGGCC | 1145 | 597 | GGCCGGCCGGCGGCGGGUC | 1326 |
| 597 | CACUGCAGGGUCCGCACUG | 1146 | 597 | CACUGCAGGGUCCGCACUG | 1146 | 615 | CAGUGCGGACCCUGCAGUG | 1327 |
| 615 | GAUCCGCUCCGCGGGGAGA | 1147 | 615 | GAUCCGCUCCGCGGGGAGA | 1147 | 633 | UCUCCCCGCGGAGCGGAUC | 1328 |
| 633 | AGCCGCUGCUCUGGGAAGU | 1148 | 633 | AGCCGCUGCUCUGGGAAGU | 1148 | 651 | ACUUCCCAGAGCAGCGGCU | 1329 |
| 651 | UGAGUUCGCCUGCGGACUC | 1149 | 651 | UGAGUUCGCCUGCGGACUC | 1149 | 669 | GAGUCCGCAGGCGAACUCA | 1330 |
| 669 | CCGAGGAACCGCUGCGCCC | 1150 | 669 | CCGAGGAACCGCUGCGCCC | 1150 | 687 | GGGCGCAGCGGUUCCUCGG | 1331 |
| 687 | CGAAGAGCGCUCAGUGAGU | 1151 | 687 | CGAAGAGCGCUCAGUGAGU | 1151 | 705 | ACUCACUGAGCGCUCUUCG | 1332 |
| 705 | UGACCGCGACUUUUCAAAG | 1152 | 705 | UGACCGCGACUUUUCAAAG | 1152 | 723 | CUUUGAAAAGUCGCGGUCA | 1333 |
| 723 | GCCGGGUAGCGCGCGCGAG | 1153 | 723 | GCCGGGUAGCGCGCGCGAG | 1153 | 741 | CUCGCGCGCGCUACCCGGC | 1334 |
| 741 | GUCGACAAGUAAGAGUGCG | 1154 | 741 | GUCGACAAGUAAGAGUGCG | 1154 | 759 | CGCACUCUUACUUGUCGAC | 1335 |
| 759 | GGGAGGCAUCUUAAUUAAC | 1155 | 759 | GGGAGGCAUCUUAAUUAAC | 1155 | 777 | GUUAAUUAAGAUGCCUCCC | 1336 |
| 777 | CCCUGCGCUCCCUGGAGCG | 1156 | 777 | CCCUGCGCUCCCUGGAGCG | 1156 | 795 | CGCUCCAGGGAGCGCAGGG | 1337 |
| 795 | GAGCUGGUGAGGAGGGCGC | 1157 | 795 | GAGCUGGUGAGGAGGGCGC | 1157 | 813 | GCGCCCUCCUCACCAGCUC | 1338 |
| 813 | CAGCGGGGACGACAGCCAG | 1158 | 813 | CAGCGGGGACGACAGCCAG | 1158 | 831 | CUGGCUGUCGUCCCCGCUG | 1339 |
| 831 | GCGGGUGCGUGCGCUCUUA | 1159 | 831 | GCGGGUGCGUGCGCUCUUA | 1159 | 849 | UAAGAGCGCACGCACCCGC | 1340 |
| 849 | AGAGAAACUUUCCCUGUCA | 1160 | 849 | AGAGAAACUUUCCCUGUCA | 1160 | 867 | UGACAGGGAAAGUUUCUCU | 1341 |
| 867 | AAAGGCUCCGGGGGGCGCG | 1161 | 867 | AAAGGCUCCGGGGGGCGCG | 1161 | 885 | CGCGCCCCCCGGAGCCUUU | 1342 |
| 885 | GGGUGUCCCCCGCUUGCCA | 1162 | 885 | GGGUGUCCCCCGCUUGCCA | 1162 | 903 | UGGCAAGCGGGGGACACCC | 1343 |
| 903 | AGAGCCCUGUUGCGGCCCC | 1163 | 903 | AGAGCCCUGUUGCGGCCCC | 1163 | 921 | GGGGCCGCAACAGGGCUCU | 1344 |
| 921 | CGAAACUUGUGCGCGCACG | 1164 | 921 | CGAAACUUGUGCGCGCACG | 1164 | 939 | CGUGCGCGCACAAGUUUCG | 1345 |
| 939 | GCCAAACUAACCUCACGUG | 1165 | 939 | GCCAAACUAACCUCACGUG | 1165 | 957 | CACGUGAGGUUAGUUUGGC | 1346 |
| 957 | GAAGUGACGGACUGUUCUA | 1166 | 957 | GAAGUGACGGACUGUUCUA | 1166 | 975 | UAGAACAGUCCGUCACUUC | 1347 |
| 975 | AUGACUGCAAAGAUGGAAA | 1167 | 975 | AUGACUGCAAAGAUGGAAA | 1167 | 993 | UUUCCAUCUUUGCAGUCAU | 1348 |
| 993 | ACGACCUUCUAUGACGAUG | 1168 | 993 | ACGACCUUCUAUGACGAUG | 1168 | 1011 | CAUCGUCAUAGAAGGUCGU | 1349 |
| 1011 | GCCCUCAACGCCUCGUUCC | 1169 | 1011 | GCCCUCAACGCCUCGUUCC | 1169 | 1029 | GGAACGAGGCGUUGAGGGC | 1350 |
| 1029 | CUCCCGUCCGAGAGCGGAC | 1170 | 1029 | CUCCCGUCCGAGAGCGGAC | 1170 | 1047 | GUCCGCUCUCGGACGGGAG | 1351 |
| 1047 | CCUUAUGGCUACAGUAACC | 1171 | 1047 | CCUUAUGGCUACAGUAACC | 1171 | 1065 | GGUUACUGUAGCCAUAAGG | 1352 |
| 1065 | CCCAAGAUCCUGAAACAGA | 1172 | 1065 | CCCAAGAUCCUGAAACAGA | 1172 | 1083 | UCUGUUUCAGGAUCUUGGG | 1353 |
| 1083 | AGCAUGACCCUGAACCUGG | 1173 | 1083 | AGCAUGACCCUGAACCUGG | 1173 | 1101 | CCAGGUUCAGGGUCAUGCU | 1354 |
| 1101 | GCCGACCCAGUGGGGAGCC | 1174 | 1101 | GCCGACCCAGUGGGGAGCC | 1174 | 1119 | GGCUCCCCACUGGGUCGGC | 1355 |
| 1119 | CUGAAGCCGCACCUCCGCG | 1175 | 1119 | CUGAAGCCGCACCUCCGCG | 1175 | 1137 | CGCGGAGGUGCGGCUUCAG | 1356 |
| 1137 | GCCAAGAACUCGGACCUCC | 1176 | 1137 | GCCAAGAACUCGGACCUCC | 1176 | 1155 | GGAGGUCCGAGUUCUUGGC | 1357 |
| 1155 | CUCACCUCGCCCGACGUGG | 1177 | 1155 | CUCACCUCGCCCGACGUGG | 1177 | 1173 | CCACGUCGGGCGAGGUGAG | 1358 |
| 1173 | GGGCUGCUCAAGCUGGCGU | 1178 | 1173 | GGGCUGCUCAAGCUGGCGU | 1178 | 1191 | ACGCCAGCUUGAGCAGCCC | 1359 |
| 1191 | UCGCCCGAGCUGGAGCGCC | 1179 | 1191 | UCGCCCGAGCUGGAGCGCC | 1179 | 1209 | GGCGCUCCAGCUCGGGCGA | 1360 |
| 1209 | CUGAUAAUCCAGUCCAGCA | 1180 | 1209 | CUGAUAAUCCAGUCCAGCA | 1180 | 1227 | UGCUGGACUGGAUUAUCAG | 1361 |
| 1227 | AACGGGCACAUCACCACCA | 1181 | 1227 | AACGGGCACAUCACCACCA | 1181 | 1245 | UGGUGGUGAUGUGCCCGUU | 1362 |
| 1245 | ACGCCGACCCCCACCCAGU | 1182 | 1245 | ACGCCGACCCCCACCCAGU | 1182 | 1263 | ACUGGGUGGGGGUCGGCGU | 1363 |
| 1263 | UUCCUGUGCCCCAAGAACG | 1183 | 1263 | UUCCUGUGCCCCAAGAACG | 1183 | 1281 | CGUUCUUGGGGCACAGGAA | 1364 |
| 1281 | GUGACAGAUGAGCAGGAGG | 1184 | 1281 | GUGACAGAUGAGCAGGAGG | 1184 | 1299 | CCUCCUGCUCAUCUGUCAC | 1365 |
| 1299 | GGGUUCGCCGAGGGCUUCG | 1185 | 1299 | GGGUUCGCCGAGGGCUUCG | 1185 | 1317 | CGAAGCCCUCGGCGAACCC | 1366 |
| 1317 | GUGCGCGCCCUGGCCGAAC | 1186 | 1317 | GUGCGCGCCCUGGCCGAAC | 1186 | 1335 | GUUCGGCCAGGGCGCGCAC | 1367 |
| 1335 | CUGCACAGCCAGAACACGC | 1187 | 1335 | CUGCACAGCCAGAACACGC | 1187 | 1353 | GCGUGUUCUGGCUGUGCAG | 1368 |
| 1353 | CUGCCCAGCGUCACGUCGG | 1188 | 1353 | CUGCCCAGCGUCACGUCGG | 1188 | 1371 | CCGACGUGACGCUGGGCAG | 1369 |
| 1371 | GCGGCGCAGCCGGUCAACG | 1189 | 1371 | GCGGCGCAGCCGGUCAACG | 1189 | 1389 | CGUUGACCGGCUGCGCCGC | 1370 |
| 1389 | GGGGCAGGCAUGGUGGCUC | 1190 | 1389 | GGGGCAGGCAUGGUGGCUC | 1190 | 1407 | GAGCCACCAUGCCUGCCCC | 1371 |
| 1407 | CCCGCGGUAGCCUCGGUGG | 1191 | 1407 | CCCGCGGUAGCCUCGGUGG | 1191 | 1425 | CCACCGAGGCUACCGCGGG | 1372 |
| 1425 | GCAGGGGGCAGCGGCAGCG | 1192 | 1425 | GCAGGGGGCAGCGGCAGCG | 1192 | 1443 | CGCUGCCGCUGCCCCCUGC | 1373 |
| 1443 | GGCGGCUUCAGCGCCAGCC | 1193 | 1443 | GGCGGCUUCAGCGCCAGCC | 1193 | 1461 | GGCUGGCGCUGAAGCCGCC | 1374 |
| 1461 | CUGCACAGCGAGCCGCCGG | 1194 | 1461 | CUGCACAGCGAGCCGCCGG | 1194 | 1479 | CCGGCGGCUCGCUGUGCAG | 1375 |
| 1479 | GUCUACGCAAACCUCAGCA | 1195 | 1479 | GUCUACGCAAACCUCAGCA | 1195 | 1497 | UGCUGAGGUUUGCGUAGAC | 1376 |
| 1497 | AACUUCAACCCAGGCGCGC | 1196 | 1497 | AACUUCAACCCAGGCGCGC | 1196 | 1515 | GCGCGCCUGGGUUGAAGUU | 1377 |
| 1515 | CUGAGCAGCGGCGGCGGGG | 1197 | 1515 | CUGAGCAGCGGCGGCGGGG | 1197 | 1533 | CCCCGCCGCCGCUGCUCAG | 1378 |
| 1533 | GCGCCCUCCUACGGCGCGG | 1198 | 1533 | GCGCCCUCCUACGGCGCGG | 1198 | 1551 | CCGCGCCGUAGGAGGGCGC | 1379 |
| 1551 | GCCGGCCUGGCCUUUCCCG | 1199 | 1551 | GCCGGCCUGGCCUUUCCCG | 1199 | 1569 | CGGGAAAGGCCAGGCCGGC | 1380 |
| 1569 | GCGCAACCCCAGCAGCAGC | 1200 | 1569 | GCGCAACCCCAGCAGCAGC | 1200 | 1587 | GCUGCUGCUGGGGUUGCGC | 1381 |
| 1587 | CAGCAGCCGCCGCACCACC | 1201 | 1587 | CAGCAGCCGCCGCACCACC | 1201 | 1605 | GGUGGUGCGGCGGCUGCUG | 1382 |
| 1605 | CUGCCCCAGCAGAUGCCCG | 1202 | 1605 | CUGCCCCAGCAGAUGCCCG | 1202 | 1623 | CGGGCAUCUGCUGGGGCAG | 1383 |
| 1623 | GUGCAGCACCCGCGGCUGC | 1203 | 1623 | GUGCAGCACCCGCGGCUGC | 1203 | 1641 | GCAGCCGCGGGUGCUGCAC | 1384 |
| 1641 | CAGGCCCUGAAGGAGGAGC | 1204 | 1641 | CAGGCCCUGAAGGAGGAGC | 1204 | 1659 | GCUCCUCCUUCAGGGCCUG | 1385 |
| 1659 | CCUCAGACAGUGCCCGAGA | 1205 | 1659 | CCUCAGACAGUGCCCGAGA | 1205 | 1677 | UCUCGGGCACUGUCUGAGG | 1386 |
| 1677 | AUGCCCGGCGAGACACCGC | 1206 | 1677 | AUGCCCGGCGAGACACCGC | 1206 | 1695 | GCGGUGUCUCGCCGGGCAU | 1387 |
| 1695 | CCCCUGUCCCCCAUCGACA | 1207 | 1695 | CCCCUGUCCCCCAUCGACA | 1207 | 1713 | UGUCGAUGGGGGACAGGGG | 1388 |
| 1713 | AUGGAGUCCCAGGAGCGGA | 1208 | 1713 | AUGGAGUCCCAGGAGCGGA | 1208 | 1731 | UCCGCUCCUGGGACUCCAU | 1389 |
| 1731 | AUCAAGGCGGAGAGGAAGC | 1209 | 1731 | AUCAAGGCGGAGAGGAAGC | 1209 | 1749 | GCUUCCUCUCCGCCUUGAU | 1390 |
| 1749 | CGCAUGAGGAACCGCAUCG | 1210 | 1749 | CGCAUGAGGAACCGCAUCG | 1210 | 1767 | CGAUGCGGUUCCUCAUGCG | 1391 |
| 1767 | GCUGCCUCCAAGUGCCGAA | 1211 | 1767 | GCUGCCUCCAAGUGCCGAA | 1211 | 1785 | UUCGGCACUUGGAGGCAGC | 1392 |
| 1785 | AAAAGGAAGCUGGAGAGAA | 1212 | 1785 | AAAAGGAAGCUGGAGAGAA | 1212 | 1803 | UUCUCUCCAGCUUCCUUUU | 1393 |
| 1803 | AUCGCCCGGCUGGAGGAAA | 1213 | 1803 | AUCGCCCGGCUGGAGGAAA | 1213 | 1821 | UUUCCUCCAGCCGGGCGAU | 1394 |
| 1821 | AAAGUGAAAACCUUGAAAG | 1214 | 1821 | AAAGUGAAAACCUUGAAAG | 1214 | 1839 | CUUUCAAGGUUUUCACUUU | 1395 |
| 1839 | GCUCAGAACUCGGAGCUGG | 1215 | 1839 | GCUCAGAACUCGGAGCUGG | 1215 | 1857 | CCAGCUCCGAGUUCUGAGC | 1396 |
| 1857 | GCGUCCACGGCCAACAUGC | 1216 | 1857 | GCGUCCACGGCCAACAUGC | 1216 | 1875 | GCAUGUUGGCCGUGGACGC | 1397 |
| 1875 | CUCAGGGAACAGGUGGCAC | 1217 | 1875 | CUCAGGGAACAGGUGGCAC | 1217 | 1893 | GUGCCACCUGUUCCCUGAG | 1398 |
| 1893 | CAGCUUAAACAGAAAGUCA | 1218 | 1893 | CAGCUUAAACAGAAAGUCA | 1218 | 1911 | UGACUUUCUGUUUAAGCUG | 1399 |
| 1911 | AUGAACCACGUUAACAGUG | 1219 | 1911 | AUGAACCACGUUAACAGUG | 1219 | 1929 | CACUGUUAACGUGGUUCAU | 1400 |
| 1929 | GGGUGCCAACUCAUGCUAA | 1220 | 1929 | GGGUGCCAACUCAUGCUAA | 1220 | 1947 | UUAGCAUGAGUUGGCACCC | 1401 |
| 1947 | ACGCAGCAGUUGCAAACAU | 1221 | 1947 | ACGCAGCAGUUGCAAACAU | 1221 | 1965 | AUGUUUGCAACUGCUGCGU | 1402 |
| 1965 | UUUUGAAGAGAGACCGUCG | 1222 | 1965 | UUUUGAAGAGAGACCGUCG | 1222 | 1983 | CGACGGUCUCUCUUCAAAA | 1403 |
| 1983 | GGGGGCUGAGGGGCAACGA | 1223 | 1983 | GGGGGCUGAGGGGCAACGA | 1223 | 2001 | UCGUUGCCCCUCAGCCCCC | 1404 |
| 2001 | AAGAAAAAAAAUAACACAG | 1224 | 2001 | AAGAAAAAAAAUAACACAG | 1224 | 2019 | CUGUGUUAUUUUUUUUCUU | 1405 |
| 2019 | GAGAGACAGACUUGAGAAC | 1225 | 2019 | GAGAGACAGACUUGAGAAC | 1225 | 2037 | GUUCUCAAGUCUGUCUCUC | 1406 |
| 2037 | CUUGACAAGUUGCGACGGA | 1226 | 2037 | CUUGACAAGUUGCGACGGA | 1226 | 2055 | UCCGUCGCAACUUGUCAAG | 1407 |
| 2055 | AGAGAAAAAAGAAGUGUCC | 1227 | 2055 | AGAGAAAAAAGAAGUGUCC | 1227 | 2073 | GGACACUUCUUUUUUCUCU | 1408 |
| 2073 | CGAGAACUAAAGCCAAGGG | 1228 | 2073 | CGAGAACUAAAGCCAAGGG | 1228 | 2091 | CCCUUGGCUUUAGUUCUCG | 1409 |
| 2091 | GUAUCCAAGUUGGACUGGG | 1229 | 2091 | GUAUCCAAGUUGGACUGGG | 1229 | 2109 | CCCAGUCCAACUUGGAUAC | 1410 |
| 2109 | GUUCGGUCUGACGGCGCCC | 1230 | 2109 | GUUCGGUCUGACGGCGCCC | 1230 | 2127 | GGGCGCCGUCAGACCGAAC | 1411 |
| 2127 | CCCAGUGUGCACGAGUGGG | 1231 | 2127 | CCCAGUGUGCACGAGUGGG | 1231 | 2145 | CCCACUCGUGCACACUGGG | 1412 |
| 2145 | GAAGGACUUGGUCGCGCCC | 1232 | 2145 | GAAGGACUUGGUCGCGCCC | 1232 | 2163 | GGGCGCGACCAAGUCCUUC | 1413 |
| 2163 | CUCCCUUGGCGUGGAGCCA | 1233 | 2163 | CUCCCUUGGCGUGGAGCCA | 1233 | 2181 | UGGCUCCACGCCAAGGGAG | 1414 |
| 2181 | AGGGAGCGGCCGCCUGCGG | 1234 | 2181 | AGGGAGCGGCCGCCUGCGG | 1234 | 2199 | CCGCAGGCGGCCGCUCCCU | 1415 |
| 2199 | GGCUGCCCCGCUUUGCGGA | 1235 | 2199 | GGCUGCCCCGCUUUGCGGA | 1235 | 2217 | UCCGCAAAGCGGGGCAGCC | 1416 |
| 2217 | ACGGGCUGUCCCCGCGCGA | 1236 | 2217 | ACGGGCUGUCCCCGCGCGA | 1236 | 2235 | UCGCGCGGGGACAGCCCGU | 1417 |
| 2235 | AACGGAACGUUGGACUUUC | 1237 | 2235 | AACGGAACGUUGGACUUUC | 1237 | 2253 | GAAAGUCCAACGUUCCGUU | 1418 |
| 2253 | CGUUAACAUUGACCAAGAA | 1238 | 2253 | CGUUAACAUUGACCAAGAA | 1238 | 2271 | UUCUUGGUCAAUGUUAACG | 1419 |
| 2271 | ACUGCAUGGACCUAACAUU | 1239 | 2271 | ACUGCAUGGACCUAACAUU | 1239 | 2289 | AAUGUUAGGUCCAUGCAGU | 1420 |
| 2289 | UCGAUCUCAUUCAGUAUUA | 1240 | 2289 | UCGAUCUCAUUCAGUAUUA | 1240 | 2307 | UAAUACUGAAUGAGAUCGA | 1421 |
| 2307 | AAAGGGGGGAGGGGGAGGG | 1241 | 2307 | AAAGGGGGGAGGGGGAGGG | 1241 | 2325 | CCCUCCCCCUCCCCCCUUU | 1422 |
| 2325 | GGGUUACAAACUGCAAUAG | 1242 | 2325 | GGGUUACAAACUGCAAUAG | 1242 | 2343 | CUAUUGCAGUUUGUAACCC | 1423 |
| 2343 | GAGACUGUAGAUUGCUUCU | 1243 | 2343 | GAGACUGUAGAUUGCUUCU | 1243 | 2361 | AGAAGCAAUCUACAGUCUC | 1424 |
| 2361 | UGUAGUACUCCUUAAGAAC | 1244 | 2361 | UGUAGUACUCCUUAAGAAC | 1244 | 2379 | GUUCUUAAGGAGUACUACA | 1425 |
| 2379 | CACAAAGCGGGGGGAGGGU | 1245 | 2379 | CACAAAGCGGGGGGAGGGU | 1245 | 2397 | ACCCUCCCCCCGCUUUGUG | 1426 |
| 2397 | UUGGGGAGGGGCGGCAGGA | 1246 | 2397 | UUGGGGAGGGGCGGCAGGA | 1246 | 2415 | UCCUGCCGCCCCUCCCCAA | 1427 |
| 2415 | AGGGAGGUUUGUGAGAGCG | 1247 | 2415 | AGGGAGGUUUGUGAGAGCG | 1247 | 2433 | CGCUCUCACAAACCUCCCU | 1428 |
| 2433 | GAGGCUGAGCCUACAGAUG | 1248 | 2433 | GAGGCUGAGCCUACAGAUG | 1248 | 2451 | CAUCUGUAGGCUCAGCCUC | 1429 |
| 2451 | GAACUCUUUCUGGCCUGCU | 1249 | 2451 | GAACUCUUUCUGGCCUGCU | 1249 | 2469 | AGCAGGCCAGAAAGAGUUC | 1430 |
| 2469 | UUUCGUUAACUGUGUAUGU | 1250 | 2469 | UUUCGUUAACUGUGUAUGU | 1250 | 2487 | ACAUACACAGUUAACGAAA | 1431 |
| 2487 | UACAUAUAUAUAUUUUUUA | 1251 | 2487 | UACAUAUAUAUAUUUUUUA | 1251 | 2505 | UAAAAAAUAUAUAUAUGUA | 1432 |
| 2505 | AAUUUGAUUAAAGCUGAUU | 1252 | 2505 | AAUUUGAUUAAAGCUGAUU | 1252 | 2523 | AAUCAGCUUUAAUCAAAUU | 1433 |
| 2523 | UACUGUCAAUAAACAGCUU | 1253 | 2523 | UACUGUCAAUAAACAGCUU | 1253 | 2541 | AAGCUGUUUAUUGACAGUA | 1434 |
| 2541 | UCAUGCCUUUGUAAGUUAU | 1254 | 2541 | UCAUGCCUUUGUAAGUUAU | 1254 | 2559 | AUAACUUACAAAGGCAUGA | 1435 |
| 2559 | UUUCUUGUUUGUUUGUUUG | 1255 | 2559 | UUUCUUGUUUGUUUGUUUG | 1255 | 2577 | CAAACAAACAAACAAGAAA | 1436 |
| 2577 | GGGUAUCCUGCCCAGUGUU | 1256 | 2577 | GGGUAUCCUGCCCAGUGUU | 1256 | 2595 | AACACUGGGCAGGAUACCC | 1437 |
| 2595 | UGUUUGUAAAUAAGAGAUU | 1257 | 2595 | UGUUUGUAAAUAAGAGAUU | 1257 | 2613 | AAUCUCUUAUUUACAAACA | 1438 |
| 2613 | UUGGAGCACUCUGAGUUUA | 1258 | 2613 | UUGGAGCACUCUGAGUUUA | 1258 | 2631 | UAAACUCAGAGUGCUCCAA | 1439 |
| 2631 | ACCAUUUGUAAUAAAGUAU | 1259 | 2631 | ACCAUUUGUAAUAAAGUAU | 1259 | 2649 | AUACUUUAUUACAAAUGGU | 1440 |
| 2649 | UAUAAUUUUUUUAUGUUUU | 1260 | 2649 | UAUAAUUUUUUUAUGUUUU | 1260 | 2667 | AAAACAUAAAAAAAUUAUA | 1441 |
| 2667 | UGUUUCUGAAAAUUCCAGA | 1261 | 2667 | UGUUUCUGAAAAUUCCAGA | 1261 | 2685 | UCUGGAAUUUUCAGAAACA | 1442 |
| 2685 | AAAGGAUAUUUAAGAAAAU | 1262 | 2685 | AAAGGAUAUUUAAGAAAAU | 1262 | 2703 | AUUUUCUUAAAUAUCCUUU | 1443 |
| 2703 | UACAAUAAACUAUUGGAAA | 1263 | 2703 | UACAAUAAACUAUUGGAAA | 1263 | 2721 | UUUCCAAUAGUUUAUUGUA | 1444 |
| 2721 | AGUACUCCCCUAACCUCUU | 1264 | 2721 | AGUACUCCCCUAACCUCUU | 1264 | 2739 | AAGAGGUUAGGGGAGUACU | 1445 |
| 2739 | UUUCUGCAUCAUCUGUAGA | 1265 | 2739 | UUUCUGCAUCAUCUGUAGA | 1265 | 2757 | UCUACAGAUGAUGCAGAAA | 1446 |
| 2757 | AUCCUAGUCUAUCUAGGUG | 1266 | 2757 | AUCCUAGUCUAUCUAGGUG | 1266 | 2775 | CACCUAGAUAGACUAGGAU | 1447 |
| 2775 | GGAGUUGAAAGAGUUAAGA | 1267 | 2775 | GGAGUUGAAAGAGUUAAGA | 1267 | 2793 | UCUUAACUCUUUCAACUCC | 1448 |
| 2793 | AAUGCUCGAUAAAAUCACU | 1268 | 2793 | AAUGCUCGAUAAAAUCACU | 1268 | 2811 | AGUGAUUUUAUCGAGCAUU | 1449 |
| 2811 | UCUCAGUGCUUCUUACUAU | 1269 | 2811 | UCUCAGUGCUUCUUACUAU | 1269 | 2829 | AUAGUAAGAAGCACUGAGA | 1450 |
| 2829 | UUAAGCAGUAAAAACUGUU | 1270 | 2829 | UUAAGCAGUAAAAACUGUU | 1270 | 2847 | AACAGUUUUUACUGCUUAA | 1451 |
| 2847 | UCUCUAUUAGACUUAGAAA | 1271 | 2847 | UCUCUAUUAGACUUAGAAA | 1271 | 2865 | UUUCUAAGUCUAAUAGAGA | 1452 |
| 2865 | AUAAAUGUACCUGAUGUAC | 1272 | 2865 | AUAAAUGUACCUGAUGUAC | 1272 | 2883 | GUACAUCAGGUACAUUUAU | 1453 |
| 2883 | CCUGAUGCUAUGUCAGGCU | 1273 | 2883 | CCUGAUGCUAUGUCAGGCU | 1273 | 2901 | AGCCUGACAUAGCAUCAGG | 1454 |
| 2901 | UUCAUACUCCACGCUCCCC | 1274 | 2901 | UUCAUACUCCACGCUCCCC | 1274 | 2919 | GGGGAGCGUGGAGUAUGAA | 1455 |
| 2919 | CCAGCGUAUCUAUAUGGAA | 1275 | 2919 | CCAGCGUAUCUAUAUGGAA | 1275 | 2937 | UUCCAUAUAGAUACGCUGG | 1456 |
| 2937 | AUUGCUUACCAAAGGCUAG | 1276 | 2937 | AUUGCUUACCAAAGGCUAG | 1276 | 2955 | CUAGCCUUUGGUAAGCAAU | 1457 |
| 2955 | GUGCGAUGUUUCAGGAGGC | 1277 | 2955 | GUGCGAUGUUUCAGGAGGC | 1277 | 2973 | GCCUCCUGAAACAUCGCAC | 1458 |
| 2973 | CUGGAGGAAGGGGGGUUGC | 1278 | 2973 | CUGGAGGAAGGGGGGUUGC | 1278 | 2991 | GCAACCCCCCUUCCUCCAG | 1459 |
| 2991 | CAGUGGAGAGGGACAGCCC | 1279 | 2991 | CAGUGGAGAGGGACAGCCC | 1279 | 3009 | GGGCUGUCCCUCUCCACUG | 1460 |
| 3009 | CACUGAGAAGUCAAACAUU | 1280 | 3009 | CACUGAGAAGUCAAACAUU | 1280 | 3027 | AAUGUUUGACUUCUCAGUG | 1461 |
| 3027 | UUCAAAGUUUGGAUUGCAU | 1281 | 3027 | UUCAAAGUUUGGAUUGCAU | 1281 | 3045 | AUGCAAUCCAAACUUUGAA | 1462 |
| 3045 | UCAAGUGGCAUGUGCUGUG | 1282 | 3045 | UCAAGUGGCAUGUGCUGUG | 1282 | 3063 | CACAGCACAUGCCACUUGA | 1463 |
| 3063 | GACCAUUUAUAAUGUUAGA | 1283 | 3063 | GACCAUUUAUAAUGUUAGA | 1283 | 3081 | UCUAACAUUAUAAAUGGUC | 1464 |
| 3081 | AAAUUUUACAAUAGGUGCU | 1284 | 3081 | AAAUUUUACAAUAGGUGCU | 1284 | 3099 | AGCACCUAUUGUAAAAUUU | 1465 |
| 3099 | UUAUUCUCAAAGCAGGAAU | 1285 | 3099 | UUAUUCUCAAAGCAGGAAU | 1285 | 3117 | AUUCCUGCUUUGAGAAUAA | 1466 |
| 3117 | UUGGUGGCAGAUUUUACAA | 1286 | 3117 | UUGGUGGCAGAUUUUACAA | 1286 | 3135 | UUGUAAAAUCUGCCACCAA | 1467 |
| 3135 | AAAGAUGUAUCCUUCCAAU | 1287 | 3135 | AAAGAUGUAUCCUUCCAAU | 1287 | 3153 | AUUGGAAGGAUACAUCUUU | 1468 |
| 3153 | UUUGGAAUCUUCUCUUUGA | 1288 | 3153 | UUUGGAAUCUUCUCUUUGA | 1288 | 3171 | UCAAAGAGAAGAUUCCAAA | 1469 |
| 3171 | ACAAUUCCUAGAUAAAAAG | 1289 | 3171 | ACAAUUCCUAGAUAAAAAG | 1289 | 3189 | CUUUUUAUCUAGGAAUUGU | 1470 |
| 3189 | GAUGGCCUUUGUCUUAUGA | 1290 | 3189 | GAUGGCCUUUGUCUUAUGA | 1290 | 3207 | UCAUAAGACAAAGGCCAUC | 1471 |
| 3207 | AAUAUUUAUAACAGCAUUC | 1291 | 3207 | AAUAUUUAUAACAGCAUUC | 1291 | 3225 | GAAUGCUGUUAUAAAUAUU | 1472 |
| 3225 | CUGUCACAAUAAAUGUAUU | 1292 | 3225 | CUGUCACAAUAAAUGUAUU | 1292 | 3243 | AAUACAUUUAUUGUGACAG | 1473 |
| 3234 | UAAAUGUAUUCAAAUACCA | 1293 | 3234 | UAAAUGUAUUCAAAUACCA | 1293 | 3252 | UGGUAUUUGAAUACAUUUA | 1474 |

The 3′-ends of the Upper sequence and the Lower sequence of the siNA construct can include an overhang sequence, for example about 1, 2, 3, or 4 nucleotides in length, preferably 2 nucleotides in length, wherein the overhanging sequence of the lower sequence is optionally complementary to a portion of the target sequence. The upper sequence is also referred to as the sense strand, whereas the lower sequence is also referred to as the antisense strand. The upper and lower sequences in the Table can further comprise a chemical modification having Formulae I-VII or any combination thereof.

TABLE III
MAP Kinase Synthetic Modified siNA constructs

| | | | | | | |
|---|---|---|---|---|---|---|
| Tar- | | | | | | |
| get | | Seq | | | | Seq |
| Pos | Target | ID | Cmpd # | Aliases | Sequence | ID |

MAPK1 NM_002745.2

| | | | | | | |
|---|---|---|---|---|---|---|
| 422 | ACCAGACCUACUGCCAGAGAACC | 1475 | | MAPK1:424U21 sense siNA | CAGACCUACUGCCAGAGAATT | 1535 |
| 586 | UUGAAGACACAACACCUCAGCAA | 1476 | | MAPK1:588U21 sense siNA | GAAGACACAACACCUCAGCTT | 1536 |
| 776 | AUCACACAGGGUUCCUGACAGAA | 1477 | | MAPK1:778U21 sense siNA | CACACAGGGUUCCUGACAGTT | 1537 |
| 1716 | UUGGCUCUAGUCACUGGCAUCUC | 1478 | | MAPK1:1718U21 sense siNA | GGCUCUAGUCACUGGCAUCTT | 1538 |
| 1969 | AUUGGCCCAGCUUUUAGAAAAUG | 1479 | | MAPK1:1971U21 sense siNA | UGGCCCAGCUUUUAGAAAATT | 1539 |
| 2523 | ACUGUGGAGUUGACUCGGUGUUC | 1480 | | MAPK1:2525U21 sense siNA | UGUGGAGUUGACUCGGUGUTT | 1540 |
| 2588 | UGUGGUGAGAAAUUUGCCUUGUU | 1481 | | MAPK1:2590U21 sense siNA | UGGUGAGAAAUUUGCCUUGTT | 1541 |
| 2626 | CCUCGCAUGACUGUUACAGCUUU | 1482 | | MAPK1:2628U21 sense siNA | UCGCAUGACUGUUACAGCUTT | 1542 |
| 422 | ACCAGACCUACUGCCAGAGAACC | 1475 | | MAPK1:442L21 antisense siNA | UUCUCUGGCAGUAGGUCUGTT | 1543 |
| | | | | (424C) | | |
| 586 | UUGAAGACACAACACCUCAGCAA | 1476 | | MAPK1:606L21 antisense siNA | GCUGAGGUGUUGUGUCUUCTT | 1544 |
| | | | | (588C) | | |
| 776 | AUCACACAGGGUUCCUGACAGAA | 1477 | | MAPK1:796L21 antisense siNA | CUGUCAGGAACCCUGUGUGTT | 1545 |
| | | | | (778C) | | |
| 1716 | UUGGCUCUAGUCACUGGCAUCUC | 1478 | | MAPK1:1736L21 antisense siNA | GAUGCCAGUGACUAGAGCCTT | 1546 |
| | | | | (1718C) | | |
| 1969 | AUUGGCCCAGCUUUUAGAAAAUG | 1479 | | MAPK1:1989L21 antisense siNA | UUUUCUAAAAGCUGGGCCATT | 1547 |
| | | | | (1971C) | | |
| 2523 | ACUGUGGAGUUGACUCGGUGUUC | 1480 | | MAPK1:2543L21 antisense siNA | ACACCGAGUCAACUCCACATT | 1548 |
| | | | | (2525C) | | |
| 2588 | UGUGGUGAGAAAUUUGCCUUGUU | 1481 | | MAPK1:2608L21 antisense siNA | CAAGGCAAAUUUCUCACCATT | 1549 |
| | | | | (2590C) | | |
| 2626 | CCUCGCAUGACUGUUACAGCUUU | 1482 | | MAPK1:2646L21 antisense siNA | AGCUGUAACAGUCAUGCGATT | 1550 |
| | | | | (2628C) | | |
| 422 | ACCAGACCUACUGCCAGAGAACC | 1475 | 30817 | MAPK1:424U21 sense siNA stab04 | B cAGAccuAcuGccAGAGAATT B | 1551 |
| 586 | UUGAAGACACAACACCUCAGCAA | 1476 | | MAPK1:588U21 sense siNA stab04 | B GAAGAcAcAAcAccucAGcTT B | 1552 |
| 776 | AUCACACAGGGUUCCUGACAGAA | 1477 | 30818 | MAPK1:778U21 sense siNA stab04 | B cAcAcAGGGuuccuGAcAGTT B | 1553 |
| 1716 | UUGGCUCUAGUCACUGGCAUCUC | 1478 | 30819 | MAPK1:1718U21 sense siNA stab04 | B GGcucuAGucAcuGGcAucTT B | 1554 |
| 1969 | AUUGGCCCAGCUUUUAGAAAAUG | 1479 | | MAPK1:1971U21 sense siNA stab04 | B uGGcccAGcuuuuAGAAAATT B | 1555 |
| 2523 | ACUGUGGAGUUGACUCGGUGUUC | 1480 | 30820 | MAPK1:2525U21 sense siNA stab04 | B uGuGGAGuuGAcucGGuGuTT B | 1556 |
| 2588 | UGUGGUGAGAAAUUUGCCUUGUU | 1481 | | MAPK1:2590U21 sense siNA stab04 | B uGGuGAGAAAuuuGccuuGTT B | 1557 |
| 2626 | CCUCGCAUGACUGUUACAGCUUU | 1482 | | MAPK1:2628U21 sense siNA stab04 | B ucGcAuGAcuGuuAcAGcuTT B | 1558 |
| 422 | ACCAGACCUACUGCCAGAGAACC | 1475 | 30821 | MAPK1:442L21 antisense siNA | uucucuGGcAGuAGGucuGTsT | 1559 |
| | | | | (424C) stab05 | | |
| 586 | UUGAAGACACAACACCUCAGCAA | 1476 | | MAPK1:606L21 antisense siNA | GcuGAGGuGuuGuGucuucTsT | 1560 |
| | | | | (588C) stab05 | | |
| 776 | AUCACACAGGGUUCCUGACAGAA | 1477 | 30822 | MAPK1:796L21 antisense siNA | cuGucAGGAAcccuGuGuGTsT | 1561 |
| | | | | (778C) stab05 | | |
| 1716 | UUGGCUCUAGUCACUGGCAUCUC | 1478 | 30823 | MAPK1:1736L21 antisense siNA | GAuGccAGuGAcuAGAGccTsT | 1562 |
| | | | | (1718C) stab05 | | |
| 1969 | AUUGGCCCAGCUUUUAGAAAAUG | 1479 | | MAPK1:1989L21 antisense siNA | uuuucuAAAAGcuGGGccATsT | 1563 |
| | | | | (1971C) stab05 | | |
| 2523 | ACUGUGGAGUUGACUCGGUGUUC | 1480 | 30824 | MAPK1:2543L21 antisense siNA | AcAccGAGucAAcuccAcATsT | 1564 |
| | | | | (2525C) stab05 | | |
| 2588 | UGUGGUGAGAAAUUUGCCUUGUU | 1481 | | MAPK1:2608L21 antisense siNA | cAAGGcAAAuuucucAccATsT | 1565 |
| | | | | (2590C) stab05 | | |
| 2626 | CCUCGCAUGACUGUUACAGCUUU | 1482 | | MAPK1:2646L21 antisense siNA | AGcuGuAAcAGucAuGcGATsT | 1566 |
| | | | | (2628C) stab05 | | |
| 422 | ACCAGACCUACUGCCAGAGAACC | 1475 | | MAPK1:424U21 sense siNA stab07 | B cAGAccuAcuGccAGAGAATT B | 1567 |
| 586 | UUGAAGACACAACACCUCAGCAA | 1476 | | MAPK1:588U21 sense siNA stab07 | B GAAGAcAcAAcAccucAGcTT B | 1568 |
| 776 | AUCACACAGGGUUCCUGACAGAA | 1477 | | MAPK1:778U21 sense siNA stab07 | B cAcAcAGGGuuccuGAcAGTT B | 1569 |
| 1716 | UUGGCUCUAGUCACUGGCAUCUC | 1478 | | MAPK1:1718U21 sense siNA stab07 | B GGcucuAGucAcuGGcAucTT B | 1570 |
| 1969 | AUUGGCCCAGCUUUUAGAAAAUG | 1479 | | MAPK1:1971U21 sense siNA stab07 | B uGGcccAGcuuuuAGAAAATT B | 1571 |
| 2523 | ACUGUGGAGUUGACUCGGUGUUC | 1480 | | MAPK1:2525U21 sense siNA stab07 | B uGuGGAGuuGAcucGGuGuTT B | 1572 |
| 2588 | UGUGGUGAGAAAUUUGCCUUGUU | 1481 | | MAPK1:2590U21 sense siNA stab07 | B uGGuGAGAAAuuuGccuuGTT B | 1573 |
| 2626 | CCUCGCAUGACUGUUACAGCUUU | 1482 | | MAPK1:2628U21 sense siNA stab07 | B ucGcAuGAcuGuuAcAGcuTT B | 1574 |
| 422 | ACCAGACCUACUGCCAGAGAACC | 1475 | | MAPK1:442L21 antisense siNA | uucucuGGcAGuAGGucuGTsT | 1575 |
| | | | | (424C) stab11 | | |
| 586 | UUGAAGACACAACACCUCAGCAA | 1476 | | MAPK1:606L21 antisense siNA | GcuGAGGuGuuGuGucuucTsT | 1576 |
| | | | | (588C) stab11 | | |
| 776 | AUCACACAGGGUUCCUGACAGAA | 1477 | | MAPK1:796L21 antisense siNA | cuGucAGGAAcccuGuGuGTsT | 1577 |
| | | | | (778C) stab11 | | |
| 1716 | UUGGCUCUAGUCACUGGCAUCUC | 1478 | | MAPK1:1736L21 antisense siNA | GAuGccAGuGAcuAGAGccTsT | 1578 |
| | | | | (1718C) stab11 | | |
| 1969 | AUUGGCCCAGCUUUUAGAAAAUG | 1479 | | MAPK1:1989L21 antisense siNA | uuuucuAAAAGcuGGGccATsT | 1579 |
| | | | | (1971C) stab11 | | |
| 2523 | ACUGUGGAGUUGACUCGGUGUUC | 1480 | | MAPK1:2543L21 antisense siNA | AcAccGAGucAAcuccAcATsT | 1580 |
| | | | | (2525C) stab11 | | |
| 2588 | UGUGGUGAGAAAUUUGCCUUGUU | 1481 | | MAPK1:2608L21 antisense siNA | cAAGGcAAAuuucucAccATsT | 1581 |
| | | | | (2590C) stab11 | | |
| 2626 | CCUCGCAUGACUGUUACAGCUUU | 1482 | | MAPK1:2646L21 antisense siNA | AGcuGuAAcAGucAuGcGATsT | 1582 |
| | | | | (2628C) stab11 | | |
| 422 | ACCAGACCUACUGCCAGAGAACC | 1475 | | MAPK1:424U21 sense siNA stab18 | B cAGAccuAcuGccAGAGAATT B | 1583 |
| 586 | UUGAAGACACAACACCUCAGCAA | 1476 | | MAPK1:588U21 sense siNA stab18 | B GAAGAcAcAAcAccucAGcTT B | 1584 |
| 776 | AUCACACAGGGUUCCUGACAGAA | 1477 | | MAPK1:778U21 sense siNA stab18 | B cAcAcAGGGuuccuGAcAGTT B | 1585 |
| 1716 | UUGGCUCUAGUCACUGGCAUCUC | 1478 | | MAPK1:1718U21 sense siNA stab18 | B GGcucuAGucAcuGGcAucTT B | 1586 |
| 1969 | AUUGGCCCAGCUUUUAGAAAAUG | 1479 | | MAPK1:1971U21 sense siNA stab18 | B uGGcccAGcuuuuAGAAAATT B | 1587 |
| 2523 | ACUGUGGAGUUGACUCGGUGUUC | 1480 | | MAPK1:2525U21 sense siNA stab18 | B uGuGGAGuuGAcucGGuGuTT B | 1588 |
| 2588 | UGUGGUGAGAAAUUUGCCUUGUU | 1481 | | MAPK1:2590U21 sense siNA stab18 | B uGGuGAGAAAuuuGccuuGTT B | 1589 |
| 2626 | CCUCGCAUGACUGUUACAGCUUU | 1482 | | MAPK1:2628U21 sense siNA stab18 | B ucGcAuGAcuGuuAcAGcuTT B | 1590 |
| 422 | ACCAGACCUACUGCCAGAGAACC | 1475 | | MAPK1:442L21 antisense siNA | uucucuGGcAGuAGGucuGTsT | 1591 |
| | | | | (424C) stab08 | | |
| 586 | UUGAAGACACAACACCUCAGCAA | 1476 | | MAPK1:606L21 antisense siNA | GcuGAGGuGuuGuGucuucTsT | 1592 |
| | | | | (588C) stab08 | | |
| 776 | AUCACACAGGGUUCCUGACAGAA | 1477 | | MAPK1:796L21 antisense siNA | cuGucAGGAAcccuGuGuGTsT | 1593 |
| | | | | (778C) stab08 | | |
| 1716 | UUGGCUCUAGUCACUGGCAUCUC | 1478 | | MAPK1:1736L21 antisense siNA | GAuGccAGuGAcuAGAGccTsT | 1594 |
| | | | | (1718C) stab08 | | |
| 1969 | AUUGGCCCAGCUUUUAGAAAAUG | 1479 | | MAPK1:1989L21 antisense siNA | uuuucuAAAAGcuGGGccATsT | 1595 |
| | | | | (1971C) stab08 | | |
| 2523 | ACUGUGGAGUUGACUCGGUGUUC | 1480 | | MAPK1:2543L21 antisense siNA | AcAccGAGucAAcuccAcATsT | 1596 |
| | | | | (2525C) stab08 | | |
| 2588 | UGUGGUGAGAAAUUUGCCUUGUU | 1481 | | MAPK1:2608L21 antisense siNA | cAAGGcAAAuuucucAccATsT | 1597 |
| | | | | (2590C) stab08 | | |
| 2626 | CCUCGCAUGACUGUUACAGCUUU | 1482 | | MAPK1:2646L21 antisense siNA | AGcuGuAAcAGucAuGcGATsT | 1598 |
| | | | | (2628C) stab08 | | |
| 422 | ACCAGACCUACUGCCAGAGAACC | 1475 | | MAPK1:424U21 sense siNA stab09 | B CAGACCUACUGCCAGAGAATT B | 1599 |
| 586 | UUGAAGACACAACACCUCAGCAA | 1476 | | MAPK1:588U21 sense siNA stab09 | B GAAGACACAACACCUCAGCTT B | 1600 |
| 776 | AUCACACAGGGUUCCUGACAGAA | 1477 | | MAPK1:778U21 sense siNA stab09 | B CACACAGGGUUCCUGACAGTT B | 1601 |
| 1716 | UUGGCUCUAGUCACUGGCAUCUC | 1478 | | MAPK1:1718U21 sense siNA stab09 | B GGCUCUAGUCACUGGCAUCTT B | 1602 |
| 1969 | AUUGGCCCAGCUUUUAGAAAAUG | 1479 | | MAPK1:1971U21 sense siNA stab09 | B UGGCCCAGCUUUUAGAAAATT B | 1603 |
| 2523 | ACUGUGGAGUUGACUCGGUGUUC | 1480 | | MAPK1:2525U21 sense siNA stab09 | B UGUGGAGUUGACUCGGUGUTT B | 1604 |
| 2588 | UGUGGUGAGAAAUUUGCCUUGUU | 1481 | | MAPK1:2590U21 sense siNA stab09 | B UGGUGAGAAAUUUGCCUUGTT B | 1605 |
| 2626 | CCUCGCAUGACUGUUACAGCUUU | 1482 | | MAPK1:2628U21 sense siNA stab09 | B UCGCAUGACUGUUACAGCUTT B | 1606 |
| 422 | ACCAGACCUACUGCCAGAGAACC | 1475 | | MAPK1:442L21 antisense siNA | UUCUCUGGCAGUAGGUCUGTsT | 1607 |
| | | | | (424C) stab10 | | |
| 586 | UUGAAGACACAACACCUCAGCAA | 1476 | | MAPK1:606L21 antisense siNA | GCUGAGGUGUUGUGUCUUCTsT | 1608 |
| | | | | (588C) stab10 | | |
| 776 | AUCACACAGGGUUCCUGACAGAA | 1477 | | MAPK1:796L21 antisense siNA | CUGUCAGGAACCCUGUGUGTsT | 1609 |
| | | | | (778C) stab10 | | |
| 1716 | UUGGCUCUAGUCACUGGCAUCUC | 1478 | | MAPK1:1736L21 antisense siNA | GAUGCCAGUGACUAGAGCCTsT | 1610 |
| | | | | (1718C) stab10 | | |
| 1969 | AUUGGCCCAGCUUUUAGAAAAUG | 1479 | | MAPK1:1989L21 antisense siNA | UUUUCUAAAAGCUGGGCCATsT | 1611 |
| | | | | (1971C) stab10 | | |
| 2523 | ACUGUGGAGUUGACUCGGUGUUC | 1480 | | MAPK1:2543L21 antisense siNA | ACACCGAGUCAACUCCACATsT | 1612 |
| | | | | (2525C) stab10 | | |
| 2588 | UGUGGUGAGAAAUUUGCCUUGUU | 1481 | | MAPK1:2608L21 antisense siNA | CAAGGCAAAUUUCUCACCATsT | 1613 |
| | | | | (2590C) stab10 | | |
| 2626 | CCUCGCAUGACUGUUACAGCUUU | 1482 | | MAPK1:2646L21 antisense siNA | AGCUGUAACAGUCAUGCGATsT | 1614 |
| | | | | (2628C) stab10 | | |
| 422 | ACCAGACCUACUGCCAGAGAACC | 1475 | | MAPK1:442L21 antisense siNA | uucucuGGcAGuAGGucuGTT B | 1615 |
| | | | | (424C) stab19 | | |
| 586 | UUGAAGACACAACACCUCAGCAA | 1476 | | MAPK1:606L21 antisense siNA | GcuGAGGuGuuGuGucuucTT B | 1616 |
| | | | | (588C) stab19 | | |
| 776 | AUCACACAGGGUUCCUGACAGAA | 1477 | | MAPK1:796L21 antisense siNA | cuGucAGGAAcccuGuGuGTT B | 1617 |
| | | | | (778C) stab19 | | |
| 1716 | UUGGCUCUAGUCACUGGCAUCUC | 1478 | | MAPK1:1736L21 antisense siNA | GAuGccAGuGAcuAGAGccTT B | 1618 |
| | | | | (1718C) stab19 | | |
| 1969 | AUUGGCCCAGCUUUUAGAAAAUG | 1479 | | MAPK1:1989L21 antisense siNA | uuuucuAAAAGcuGGGccATT B | 1619 |
| | | | | (1971C) stab19 | | |
| 2523 | ACUGUGGAGUUGACUCGGUGUUC | 1480 | | MAPK1:2543L21 antisense siNA | AcAccGAGucAAcuccAcATT B | 1620 |
| | | | | (2525C) stab19 | | |
| 2588 | UGUGGUGAGAAAUUUGCCUUGUU | 1481 | | MAPK1:2608L21 antisense siNA | cAAGGcAAAuuucucAccATT B | 1621 |
| | | | | (2590C) stab19 | | |
| 2626 | CCUCGCAUGACUGUUACAGCUUU | 1482 | | MAPK1:2646L21 antisense siNA | AGcuGuAAcAGucAuGcGATT B | 1622 |
| | | | | (2628C) stab19 | | |
| 422 | ACCAGACCUACUGCCAGAGAACC | 1475 | | MAPK1:442L21 antisense siNA | UUCUCUGGCAGUAGGUCUGTT B | 1623 |
| | | | | (424C) stab22 | | |
| 586 | UUGAAGACACAACACCUCAGCAA | 1476 | | MAPK1:606L21 antisense siNA | GCUGAGGUGUUGUGUCUUCTT B | 1624 |
| | | | | (588C) stab22 | | |
| 776 | AUCACACAGGGUUCCUGACAGAA | 1477 | | MAPK1:796L21 antisense siNA | CUGUCAGGAACCCUGUGUGTT B | 1625 |
| | | | | (778C) stab22 | | |
| 1716 | UUGGCUCUAGUCACUGGCAUCUC | 1478 | | MAPK1:1736L21 antisense siNA | GAUGCCAGUGACUAGAGCCTT B | 1626 |
| | | | | (1718C) stab22 | | |
| 1969 | AUUGGCCCAGCUUUUAGAAAAUG | 1479 | | MAPK1:1989L21 antisense siNA | UUUUCUAAAAGCUGGGCCATT B | 1627 |
| | | | | (1971C) stab22 | | |
| 2523 | ACUGUGGAGUUGACUCGGUGUUC | 1480 | | MAPK1:2543L21 antisense siNA | ACACCGAGUCAACUCCACATT B | 1628 |
| | | | | (2525C) stab22 | | |
| 2588 | UGUGGUGAGAAAUUUGCCUUGUU | 1481 | | MAPK1:2608L21 antisense siNA | CAAGGCAAAUUUCUCACCATT B | 1629 |
| | | | | (2590C) stab22 | | |
| 2626 | CCUCGCAUGACUGUUACAGCUUU | 1482 | | MAPK1:2646L21 antisense siNA | AGCUGUAACAGUCAUGCGATT B | 1630 |
| | | | | (2628C) stab22 | | |

MAPK3

| | | | | | | |
|---|---|---|---|---|---|---|
| 283 | CCUUCGAACAUCAGACCUACUGC | 1483 | | MAPK3:285U21 sense siNA | UUCGAACAUCAGACCUACUTT | 1631 |
| 709 | UGAACUCCAAGGGCUAUACCAAG | 1484 | | MAPK3:711U21 sense siNA | AACUCCAAGGGCUAUACCATT | 1632 |
| 716 | CAAGGGCUAUACCAAGUCCAUCG | 1485 | | MAPK3:718U21 sense siNA | AGGGCUAUACCAAGUCCAUTT | 1633 |
| 718 | AGGGCUAUACCAAGUCCAUCGAC | 1486 | | MAPK3:720U21 sense siNA | GGCUAUACCAAGUCCAUCGTT | 1634 |
| 1045 | ACCUGGAGCAGUACUAUGACCCG | 1487 | | MAPK3:1047U21 sense siNA | CUGGAGCAGUACUAUGACCTT | 1635 |
| 1305 | CUCCCGCCAGACUGUUAGAAAAU | 1488 | | MAPK3:1307U21 sense siNA | CCCGCCAGACUGUUAGAAATT | 1636 |
| 1778 | UUCUGUGUGUGGUGAGCAGAAGU | 1489 | | MAPK3:1780U21 sense siNA | CUGUGUGUGGUGAGCAGAATT | 1637 |
| 1782 | GUGUGUGGUGAGCAGAAGUGGAG | 1490 | | MAPK3:1784U21 sense siNA | GUGUGGUGAGCAGAAGUGGTT | 1638 |
| 283 | CCUUCGAACAUCAGACCUACUGC | 1483 | | MAPK3:303L21 antisense siNA | AGUAGGUCUGAUGUUCGAATT | 1639 |
| | | | | (285C) | | |
| 709 | UGAACUCCAAGGGCUAUACCAAG | 1484 | | MAPK3:729L21 antisense siNA | UGGUAUAGCCCUUGGAGUUTT | 1640 |
| | | | | (711C) | | |
| 716 | CAAGGGCUAUACCAAGUCCAUCG | 1485 | | MAPK3:736L21 antisense siNA | AUGGACUUGGUAUAGCCCUTT | 1641 |
| | | | | (718C) | | |
| 718 | AGGGCUAUACCAAGUCCAUCGAC | 1486 | | MAPK3:738L21 antisense siNA | CGAUGGACUUGGUAUAGCCTT | 1642 |
| | | | | (720C) | | |
| 1045 | ACCUGGAGCAGUACUAUGACCCG | 1487 | | MAPK3:1065L21 antisense siNA | GGUCAUAGUACUGCUCCAGTT | 1643 |
| | | | | (1047C) | | |
| 1305 | CUCCCGCCAGACUGUUAGAAAAU | 1488 | | MAPK3:1325L21 antisense siNA | UUUCUAACAGUCUGGCGGGTT | 1644 |
| | | | | (1307C) | | |
| 1778 | UUCUGUGUGUGGUGAGCAGAAGU | 1489 | | MAPK3:1798L21 antisense siNA | UUCUGCUCACCACACACAGTT | 1645 |
| | | | | (1780C) | | |
| 1782 | GUGUGUGGUGAGCAGAAGUGGAG | 1490 | | MAPK3:1802L21 antisense siNA | CCACUUCUGCUCACCACACTT | 1646 |
| | | | | (1784C) | | |
| 283 | CCUUCGAACAUCAGACCUACUGC | 1483 | | MAPK3:285U21 sense siNA stab04 | B uucGAAcAucAGAccuAcuTT B | 1647 |
| 709 | UGAACUCCAAGGGCUAUACCAAG | 1484 | | MAPK3:711U21 sense siNA stab04 | B AAcuccAAGGGcuAuAccATT B | 1648 |
| 716 | CAAGGGCUAUACCAAGUCCAUCG | 1485 | | MAPK3:718U21 sense siNA stab04 | B AGGGcuAuAccAAGuccAuTT B | 1649 |
| 718 | AGGGCUAUACCAAGUCCAUCGAC | 1486 | | MAPK3:720U21 sense siNA stab04 | B GGcuAuAccAAGuccAucGTT B | 1650 |
| 1045 | ACCUGGAGCAGUACUAUGACCCG | 1487 | | MAPK3:1047U21 sense siNA stab04 | B cuGGAGcAGuAcuAuGAccTT B | 1651 |
| 1305 | CUCCCGCCAGACUGUUAGAAAAU | 1488 | | MAPK3:1307U21 sense siNA stab04 | B cccGccAGAcuGuuAGAAATT B | 1652 |
| 1778 | UUCUGUGUGUGGUGAGCAGAAGU | 1489 | | MAPK3:1780U21 sense siNA stab04 | B cuGuGuGuGGuGAGcAGAATT B | 1653 |
| 1782 | GUGUGUGGUGAGCAGAAGUGGAG | 1490 | | MAPK3:1784U21 sense siNA stab04 | B GuGuGGuGAGcAGAAGuGGTT B | 1654 |
| 283 | CCUUCGAACAUCAGACCUACUGC | 1483 | | MAPK3:303L21 antisense siNA | AGuAGGucuGAuGuucGAATsT | 1655 |
| | | | | (285C) stab05 | | |
| 709 | UGAACUCCAAGGGCUAUACCAAG | 1484 | | MAPK3:729L21 antisense siNA | uGGuAuAGcccuuGGAGuuTsT | 1656 |
| | | | | (711C) stab05 | | |
| 716 | CAAGGGCUAUACCAAGUCCAUCG | 1485 | | MAPK3:736L21 antisense siNA | AuGGAcuuGGuAuAGcccuTsT | 1657 |
| | | | | (718C) stab05 | | |
| 718 | AGGGCUAUACCAAGUCCAUCGAC | 1486 | | MAPK3:738L21 antisense siNA | cGAuGGAcuuGGuAuAGccTsT | 1658 |
| | | | | (720C) stab05 | | |
| 1045 | ACCUGGAGCAGUACUAUGACCCG | 1487 | | MAPK3:1065L21 antisense siNA | GGucAuAGuAcuGcuccAGTsT | 1659 |
| | | | | (1047C) stab05 | | |
| 1305 | CUCCCGCCAGACUGUUAGAAAAU | 1488 | | MAPK3:1325L21 antisense siNA | uuucuAAcAGucuGGcGGGTsT | 1660 |
| | | | | (1307C) stab05 | | |
| 1778 | UUCUGUGUGUGGUGAGCAGAAGU | 1489 | | MAPK3:1798L21 antisense siNA | uucuGcucAccAcAcAcAGTsT | 1661 |
| | | | | (1780C) stab05 | | |
| 1782 | GUGUGUGGUGAGCAGAAGUGGAG | 1490 | | MAPK3:1802L21 antisense siNA | ccAcuucuGcucAccAcAcTsT | 1662 |
| | | | | (1784C) stab05 | | |
| 283 | CCUUCGAACAUCAGACCUACUGC | 1483 | | MAPK3:285U21 sense siNA stab07 | B uucGAAcAucAGAccuAcuTT B | 1663 |
| 709 | UGAACUCCAAGGGCUAUACCAAG | 1484 | | MAPK3:711U21 sense siNA stab07 | B AAcuccAAGGGcuAuAccATT B | 1664 |
| 716 | CAAGGGCUAUACCAAGUCCAUCG | 1485 | | MAPK3:718U21 sense siNA stab07 | B AGGGcuAuAccAAGuccAuTT B | 1665 |
| 718 | AGGGCUAUACCAAGUCCAUCGAC | 1486 | | MAPK3:720U21 sense siNA stab07 | B GGcuAuAccAAGuccAucGTT B | 1666 |
| 1045 | ACCUGGAGCAGUACUAUGACCCG | 1487 | | MAPK3:1047U21 sense siNA stab07 | B cuGGAGcAGuAcuAuGAccTT B | 1667 |
| 1305 | CUCCCGCCAGACUGUUAGAAAAU | 1488 | | MAPK3:1307U21 sense siNA stab07 | B cccGccAGAcuGuuAGAAATT B | 1668 |
| 1778 | UUCUGUGUGUGGUGAGCAGAAGU | 1489 | | MAPK3:1780U21 sense siNA stab07 | B cuGuGuGuGGuGAGcAGAATT B | 1669 |
| 1782 | GUGUGUGGUGAGCAGAAGUGGAG | 1490 | | MAPK3:1784U21 sense siNA stab07 | B GuGuGGuGAGcAGAAGuGGTT B | 1670 |
| 283 | CCUUCGAACAUCAGACCUACUGC | 1483 | | MAPK3:303L21 antisense siNA | AGuAGGucuGAuGuucGAATsT | 1671 |
| | | | | (285C) stab11 | | |
| 709 | UGAACUCCAAGGGCUAUACCAAG | 1484 | | MAPK3:729L21 antisense siNA | uGGuAuAGcccuuGGAGuuTsT | 1672 |
| | | | | (711C) stab11 | | |
| 716 | CAAGGGCUAUACCAAGUCCAUCG | 1485 | | MAPK3:736L21 antisense siNA | AuGGAcuuGGuAuAGcccuTsT | 1673 |
| | | | | (718C) stab11 | | |
| 718 | AGGGCUAUACCAAGUCCAUCGAC | 1486 | | MAPK3:738L21 antisense siNA | cGAuGGAcuuGGuAuAGccTsT | 1674 |
| | | | | (720C) stab11 | | |
| 1045 | ACCUGGAGCAGUACUAUGACCCG | 1487 | | MAPK3:1065L21 antisense siNA | GGucAuAGuAcuGcuccAGTsT | 1675 |
| | | | | (1047C) stab11 | | |
| 1305 | CUCCCGCCAGACUGUUAGAAAAU | 1488 | | MAPK3:1325L21 antisense siNA | uuucuAAcAGucuGGcGGGTsT | 1676 |
| | | | | (1307C) stab11 | | |
| 1778 | UUCUGUGUGUGGUGAGCAGAAGU | 1489 | | MAPK3:1798L21 antisense siNA | uucuGcucAccAcAcAcAGTsT | 1677 |
| | | | | (1780C) stab11 | | |
| 1782 | GUGUGUGGUGAGCAGAAGUGGAG | 1490 | | MAPK3:1802L21 antisense siNA | ccAcuucuGcucAccAcAcTsT | 1678 |
| | | | | (1784C) stab11 | | |
| 283 | CCUUCGAACAUCAGACCUACUGC | 1483 | | MAPK3:285U21 sense siNA stab18 | B uucGAAcAucAGAccuAcuTT B | 1679 |
| 709 | UGAACUCCAAGGGCUAUACCAAG | 1484 | | MAPK3:711U21 sense siNA stab18 | B AAcuccAAGGGcuAuAccATT B | 1680 |
| 716 | CAAGGGCUAUACCAAGUCCAUCG | 1485 | | MAPK3:718U21 sense siNA stab18 | B AGGGcuAuAccAAGuccAuTT B | 1681 |
| 718 | AGGGCUAUACCAAGUCCAUCGAC | 1486 | | MAPK3:720U21 sense siNA stab18 | B GGcuAuAccAAGuccAucGTT B | 1682 |
| 1045 | ACCUGGAGCAGUACUAUGACCCG | 1487 | | MAPK3:1047U21 sense siNA stab18 | B cuGGAGcAGuAcuAuGAccTT B | 1683 |
| 1305 | CUCCCGCCAGACUGUUAGAAAAU | 1488 | | MAPK3:1307U21 sense siNA stab18 | B cccGccAGAcuGuuAGAAATT B | 1684 |
| 1778 | UUCUGUGUGUGGUGAGCAGAAGU | 1489 | | MAPK3:1780U21 sense siNA stab18 | B cuGuGuGuGGuGAGcAGAATT B | 1685 |
| 1782 | GUGUGUGGUGAGCAGAAGUGGAG | 1490 | | MAPK3:1784U21 sense siNA stab18 | B GuGuGGuGAGcAGAAGuGGTT B | 1686 |
| 283 | CCUUCGAACAUCAGACCUACUGC | 1483 | 33669 | MAPK3:303L21 antisense siNA | AGuAGGucuGAuGuucGAATsT | 1687 |
| | | | | (285C) stab08 | | |
| 709 | UGAACUCCAAGGGCUAUACCAAG | 1484 | 33670 | MAPK3:729L21 antisense siNA | uGGuAuAGcccuuGGAGuuTsT | 1688 |
| | | | | (711C) stab08 | | |
| 716 | CAAGGGCUAUACCAAGUCCAUCG | 1485 | 33671 | MAPK3:736L21 antisense siNA | AuGGAcuuGGuAuAGcccuTsT | 1689 |
| | | | | (718C) stab08 | | |
| 718 | AGGGCUAUACCAAGUCCAUCGAC | 1486 | 33672 | MAPK3:738L21 antisense siNA | cGAuGGAcuuGGuAuAGccTsT | 1690 |
| | | | | (720C) stab08 | | |
| 1045 | ACCUGGAGCAGUACUAUGACCCG | 1487 | 33673 | MAPK3:1065L21 antisense siNA | GGucAuAGuAcuGcuccAGTsT | 1691 |
| | | | | (1047C) stab08 | | |
| 1305 | CUCCCGCCAGACUGUUAGAAAAU | 1488 | 33674 | MAPK3:1325L21 antisense siNA | uuucuAAcAGucuGGcGGGTsT | 1692 |
| | | | | (1307C) stab08 | | |
| 1778 | UUCUGUGUGUGGUGAGCAGAAGU | 1489 | 33675 | MAPK3:1798L21 antisense siNA | uucuGcucAccAcAcAcAGTsT | 1693 |
| | | | | (1780C) stab08 | | |
| 1782 | GUGUGUGGUGAGCAGAAGUGGAG | 1490 | 33676 | MAPK3:1802L21 antisense siNA | ccAcuucuGcucAccAcAcTsT | 1694 |
| | | | | (1784C) stab08 | | |
| 283 | CCUUCGAACAUCAGACCUACUGC | 1483 | 33653 | MAPK3:285U21 sense siNA stab09 | B UUCGAACAUCAGACCUACUTT B | 1695 |
| 709 | UGAACUCCAAGGGCUAUACCAAG | 1484 | 33654 | MAPK3:711U21 sense siNA stab09 | B AACUCCAAGGGCUAUACCATT B | 1696 |
| 716 | CAAGGGCUAUACCAAGUCCAUCG | 1485 | 33655 | MAPK3:718U21 sense siNA stab09 | B AGGGCUAUACCAAGUCCAUTT B | 1697 |
| 718 | AGGGCUAUACCAAGUCCAUCGAC | 1486 | 33656 | MAPK3:720U21 sense siNA stab09 | B GGCUAUACCAAGUCCAUCGTT B | 1698 |
| 1045 | ACCUGGAGCAGUACUAUGACCCG | 1487 | 33657 | MAPK3:1047U21 sense siNA stab09 | B CUGGAGCAGUACUAUGACCTT B | 1699 |
| 1305 | CUCCCGCCAGACUGUUAGAAAAU | 1488 | 33658 | MAPK3:1307U21 sense siNA stab09 | B CCCGCCAGACUGUUAGAAATT B | 1700 |
| 1778 | UUCUGUGUGUGGUGAGCAGAAGU | 1489 | 33659 | MAPK3:1780U21 sense siNA stab09 | B CUGUGUGUGGUGAGCAGAATT B | 1701 |
| 1782 | GUGUGUGGUGAGCAGAAGUGGAG | 1490 | 33660 | MAPK3:1784U21 sense siNA stab09 | B GUGUGGUGAGCAGAAGUGGTT B | 1702 |
| 283 | CCUUCGAACAUCAGACCUACUGC | 1483 | 33661 | MAPK3:303L21 antisense siNA | AGUAGGUCUGAUGUUCGAATsT | 1703 |
| | | | | (285C) stab10 | | |
| 709 | UGAACUCCAAGGGCUAUACCAAG | 1484 | 33662 | MAPK3:729L21 antisense siNA | UGGUAUAGCCCUUGGAGUUTsT | 1704 |
| | | | | (711C) stab10 | | |
| 716 | CAAGGGCUAUACCAAGUCCAUCG | 1485 | 33663 | MAPK3:736L21 antisense siNA | AUGGACUUGGUAUAGCCCUTsT | 1705 |
| | | | | (718C) stab10 | | |
| 718 | AGGGCUAUACCAAGUCCAUCGAC | 1486 | 33664 | MAPK3:738L21 antisense siNA | CGAUGGACUUGGUAUAGCCTsT | 1706 |
| | | | | (720C) stab10 | | |
| 1045 | ACCUGGAGCAGUACUAUGACCCG | 1487 | 33665 | MAPK3:1065L21 antisense siNA | GGUCAUAGUACUGCUCCAGTsT | 1707 |
| | | | | (1047C) stab10 | | |
| 1305 | CUCCCGCCAGACUGUUAGAAAAU | 1488 | 33666 | MAPK3:1325L21 antisense siNA | UUUCUAACAGUCUGGCGGGTsT | 1708 |
| | | | | (1307C) stab10 | | |
| 1778 | UUCUGUGUGUGGUGAGCAGAAGU | 1489 | 33667 | MAPK3:1798L21 antisense siNA | UUCUGCUCACCACACACAGTsT | 1709 |
| | | | | (1780C) stab10 | | |
| 1782 | GUGUGUGGUGAGCAGAAGUGGAG | 1490 | 33668 | MAPK3:1802L21 antisense siNA | CCACUUCUGCUCACCACACTsT | 1710 |
| | | | | (1784C) stab10 | | |
| 283 | CCUUCGAACAUCAGACCUACUGC | 1483 | | MAPK3:303L21 antisense siNA | AGuAGGucuGAuGuucGAATT B | 1711 |
| | | | | (285C) stab19 | | |
| 709 | UGAACUCCAAGGGCUAUACCAAG | 1484 | | MAPK3:729L21 antisense siNA | uGGuAuAGcccuuGGAGuuTT B | 1712 |
| | | | | (711C) stab19 | | |
| 716 | CAAGGGCUAUACCAAGUCCAUCG | 1485 | | MAPK3:736L21 antisense siNA | AuGGAcuuGGuAuAGcccuTT B | 1713 |
| | | | | (718C) stab19 | | |
| 718 | AGGGCUAUACCAAGUCCAUCGAC | 1486 | | MAPK3:738L21 antisense siNA | cGAuGGAcuuGGuAuAGccTT B | 1714 |
| | | | | (720C) stab19 | | |
| 1045 | ACCUGGAGCAGUACUAUGACCCG | 1487 | | MAPK3:1065L21 antisense siNA | GGucAuAGuAcuGcuccAGTT B | 1715 |
| | | | | (1047C) stab19 | | |
| 1305 | CUCCCGCCAGACUGUUAGAAAAU | 1488 | | MAPK3:1325L21 antisense siNA | uuucuAAcAGucuGGcGGGTT B | 1716 |
| | | | | (1307C) stab19 | | |
| 1778 | UUCUGUGUGUGGUGAGCAGAAGU | 1489 | | MAPK3:1798L21 antisense siNA | uucuGcucAccAcAcAcAGTT B | 1717 |
| | | | | (1780C) stab19 | | |
| 1782 | GUGUGUGGUGAGCAGAAGUGGAG | 1490 | | MAPK3:1802L21 antisense siNA | ccAcuucuGcucAccAcAcTT B | 1718 |
| | | | | (1784C) stab19 | | |
| 283 | CCUUCGAACAUCAGACCUACUGC | 1483 | | MAPK3:303L21 antisense siNA | AGUAGGUCUGAUGUUCGAATT B | 1719 |
| | | | | (285C) stab22 | | |
| 709 | UGAACUCCAAGGGCUAUACCAAG | 1484 | | MAPK3:729L21 antisense siNA | UGGUAUAGCCCUUGGAGUUTT B | 1720 |
| | | | | (711C) stab22 | | |
| 716 | CAAGGGCUAUACCAAGUCCAUCG | 1485 | | MAPK3:736L21 antisense siNA | AUGGACUUGGUAUAGCCCUTT B | 1721 |
| | | | | (718C) stab22 | | |
| 718 | AGGGCUAUACCAAGUCCAUCGAC | 1486 | | MAPK3:738L21 antisense siNA | CGAUGGACUUGGUAUAGCCTT B | 1722 |
| | | | | (720C) stab22 | | |
| 1045 | ACCUGGAGCAGUACUAUGACCCG | 1487 | | MAPK3:1065L21 antisense siNA | GGUCAUAGUACUGCUCCAGTT B | 1723 |
| | | | | (1047C) stab22 | | |
| 1305 | CUCCCGCCAGACUGUUAGAAAAU | 1488 | | MAPK3:1325L21 antisense siNA | UUUCUAACAGUCUGGCGGGTT B | 1724 |
| | | | | (1307C) stab22 | | |
| 1778 | UUCUGUGUGUGGUGAGCAGAAGU | 1489 | | MAPK3:1798L21 antisense siNA | UUCUGCUCACCACACACAGTT B | 1725 |
| | | | | (1780C) stab22 | | |
| 1782 | GUGUGUGGUGAGCAGAAGUGGAG | 1490 | | MAPK3:1802L21 antisense siNA | CCACUUCUGCUCACCACACTT B | 1726 |
| | | | | (1784C) stab22 | | |

MAPK8 NM_002750.2I

| | | | | | | |
|---|---|---|---|---|---|---|
| 25 | GAAGCAAGCGUGACAACAAUUUU | 1491 | | MAPK8:27U21 sense siNA | AGCAAGCGUGACAACAAUUTT | 1727 |
| 733 | AACAGCUUGGAACACCAUGUCCU | 1492 | 31517 | MAPK8:735U21 sense siNA | CAGCUUGGAACACCAUGUCTT | 1728 |
| 852 | CUUUUCCCAGCUGACUCAGAACA | 1493 | | MAPK8:854U21 sense siNA | UUUCCCAGCUGACUCAGAATT | 1729 |
| 853 | UUUUCCCAGCUGACUCAGAACAC | 1494 | 31518 | MAPK8:855U21 sense siNA | UUCCCAGCUGACUCAGAACTT | 1730 |
| 878 | CAAACUUAAAGCCAGUCAGGCAA | 1495 | | MAPK8:880U21 sense siNA | AACUUAAAGCCAGUCAGGCTT | 1731 |
| 895 | AGGCAAGGGAUUUGUUAUCCAAA | 1496 | | MAPK8:897U21 sense siNA | GCAAGGGAUUUGUUAUCCATT | 1732 |
| 1224 | CAAUGUCAACAGAUCCGACUUUG | 1497 | 31519 | MAPK8:1226U21 sense siNA | AUGUCAACAGAUCCGACUUTT | 1733 |
| 1242 | CUUUGGCCUCUGAUACAGACAGC | 1498 | 31520 | MAPK8:1244U21 sense siNA | UUGGCCUCUGAUACAGACATT | 1734 |
| 25 | GAAGCAAGCGUGACAACAAUUUU | 1491 | | MAPK8:45L21 antisense siNA | AAUUGUUGUCACGCUUGCUTT | 1735 |
| | | | | (27C) | | |
| 733 | AACAGCUUGGAACACCAUGUCCU | 1492 | 31521 | MAPK8:753L21 antisense siNA | GACAUGGUGUUCCAAGCUGTT | 1736 |
| | | | | (735C) | | |
| 852 | CUUUUCCCAGCUGACUCAGAACA | 1493 | | MAPK8:872L21 antisense siNA | UUCUGAGUCAGCUGGGAAATT | 1737 |
| | | | | (854C) | | |
| 853 | UUUUCCCAGCUGACUCAGAACAC | 1494 | 31522 | MAPK8:873L21 antisense siNA | GUUCUGAGUCAGCUGGGAATT | 1738 |
| | | | | (855C) | | |
| 878 | CAAACUUAAAGCCAGUCAGGCAA | 1495 | | MAPK8:898L21 antisense siNA | GCCUGACUGGCUUUAAGUUTT | 1739 |
| | | | | (880C) | | |
| 895 | AGGCAAGGGAUUUGUUAUCCAAA | 1496 | | MAPK8:915L21 antisense siNA | UGGAUAACAAAUCCCUUGCTT | 1740 |
| | | | | (897C) | | |
| 1224 | CAAUGUCAACAGAUCCGACUUUG | 1497 | 31523 | MAPK8:1244L21 antisense siNA | AAGUCGGAUCUGUUGACAUTT | 1741 |
| | | | | (1226C) | | |
| 1242 | CUUUGGCCUCUGAUACAGACAGC | 1498 | 31524 | MAPK8:1262L21 antisense siNA | UGUCUGUAUCAGAGGCCAATT | 1742 |
| | | | | (1244C) | | |
| 25 | GAAGCAAGCGUGACAACAAUUUU | 1491 | | MAPK8:27U21 sense siNA stab04 | B AGcAAGcGuGAcAAcAAuuTT B | 1743 |
| 733 | AACAGCUUGGAACACCAUGUCCU | 1492 | | MAPK8:735U21 sense siNA stab04 | B cAGcuuGGAAcAccAuGucTT B | 1744 |
| 852 | CUUUUCCCAGCUGACUCAGAACA | 1493 | | MAPK8:854U21 sense siNA stab04 | B uuucccAGcuGAcucAGAATT B | 1745 |
| 853 | UUUUCCCAGCUGACUCAGAACAC | 1494 | | MAPK8:855U21 sense siNA stab04 | B uucccAGcuGAcucAGAAcTT B | 1746 |
| 878 | CAAACUUAAAGCCAGUCAGGCAA | 1495 | | MAPK8:880U21 sense siNA stab04 | B AAcuuAAAGccAGucAGGcTT B | 1747 |
| 895 | AGGCAAGGGAUUUGUUAUCCAAA | 1496 | | MAPK8:897U21 sense siNA stab04 | B GcAAGGGAuuuGuuAuccATT B | 1748 |
| 1224 | CAAUGUCAACAGAUCCGACUUUG | 1497 | | MAPK8:1226U21 sense siNA stab04 | B AuGucAAcAGAuccGAcuuTT B | 1749 |
| 1242 | CUUUGGCCUCUGAUACAGACAGC | 1498 | | MAPK8:1244U21 sense siNA stab04 | B uuGGccucuGAuAcAGAcATT B | 1750 |
| 25 | GAAGCAAGCGUGACAACAAUUUU | 1491 | | MAPK8:45L21 antisense siNA | AAuuGuuGucAcGcuuGcuTsT | 1751 |
| | | | | (27C) stab05 | | |
| 733 | AACAGCUUGGAACACCAUGUCCU | 1492 | | MAPK8:753L21 antisense siNA | GAcAuGGuGuuccAAGcuGTsT | 1752 |
| | | | | (735C) stab05 | | |
| 852 | CUUUUCCCAGCUGACUCAGAACA | 1493 | | MAPK8:872L21 antisense siNA | uucuGAGucAGcuGGGAAATsT | 1753 |
| | | | | (854C) stab05 | | |
| 853 | UUUUCCCAGCUGACUCAGAACAC | 1494 | | MAPK8:873L21 antisense siNA | GuucuGAGucAGcuGGGAATsT | 1754 |
| | | | | (855C) stab05 | | |
| 878 | CAAACUUAAAGCCAGUCAGGCAA | 1495 | | MAPK8:898L21 antisense siNA | GccuGAcuGGcuuuAAGuuTsT | 1755 |
| | | | | (880C) stab05 | | |
| 895 | AGGCAAGGGAUUUGUUAUCCAAA | 1496 | | MAPK8:915L21 antisense siNA | uGGAuAAcAAAucccuuGcTsT | 1756 |
| | | | | (897C) stab05 | | |
| 1224 | CAAUGUCAACAGAUCCGACUUUG | 1497 | | MAPK8:1244L21 antisense siNA | AAGucGGAucuGuuGAcAuTsT | 1757 |
| | | | | (1226C) stab05 | | |
| 1242 | CUUUGGCCUCUGAUACAGACAGC | 1498 | | MAPK8:1262L21 antisense siNA | uGucuGuAucAGAGGccAATsT | 1758 |
| | | | | (1244C) stab05 | | |
| 25 | GAAGCAAGCGUGACAACAAUUUU | 1491 | | MAPK8:27U21 sense siNA stab07 | B AGcAAGcGuGAcAAcAAuuTT B | 1759 |
| 733 | AACAGCUUGGAACACCAUGUCCU | 1492 | | MAPK8:735U21 sense siNA stab07 | B cAGcuuGGAAcAccAuGucTT B | 1760 |
| 852 | CUUUUCCCAGCUGACUCAGAACA | 1493 | | MAPK8:854U21 sense siNA stab07 | B uuucccAGcuGAcucAGAATT B | 1761 |
| 853 | UUUUCCCAGCUGACUCAGAACAC | 1494 | | MAPK8:855U21 sense siNA stab07 | B uucccAGcuGAcucAGAAcTT B | 1762 |
| 878 | CAAACUUAAAGCCAGUCAGGCAA | 1495 | | MAPK8:880U21 sense siNA stab07 | B AAcuuAAAGccAGucAGGcTT B | 1763 |
| 895 | AGGCAAGGGAUUUGUUAUCCAAA | 1496 | | MAPK8:897U21 sense siNA stab07 | B GcAAGGGAuuuGuuAuccATT B | 1764 |
| 1224 | CAAUGUCAACAGAUCCGACUUUG | 1497 | 31866 | MAPK8:1226U21 sense siNA stab07 | B AuGucAAcAGAuccGAcuuTT B | 1765 |
| 1242 | CUUUGGCCUCUGAUACAGACAGC | 1498 | | MAPK8:1244U21 sense siNA stab07 | B uuGGccucuGAuAcAGAcATT B | 1766 |
| 25 | GAAGCAAGCGUGACAACAAUUUU | 1491 | | MAPK8:45L21 antisense siNA | AAuuGuuGucAcGcuuGcuTsT | 1767 |
| | | | | (27C) stab11 | | |
| 733 | AACAGCUUGGAACACCAUGUCCU | 1492 | | MAPK8:753L21 antisense siNA | GAcAuGGuGuuccAAGcuGTsT | 1768 |
| | | | | (735C) stab11 | | |
| 852 | CUUUUCCCAGCUGACUCAGAACA | 1493 | | MAPK8:872L21 antisense siNA | uucuGAGucAGcuGGGAAATsT | 1769 |
| | | | | (854C) stab11 | | |
| 853 | UUUUCCCAGCUGACUCAGAACAC | 1494 | | MAPK8:873L21 antisense siNA | GuucuGAGucAGcuGGGAATsT | 1770 |
| | | | | (855C) stab11 | | |
| 878 | CAAACUUAAAGCCAGUCAGGCAA | 1495 | | MAPK8:898L21 antisense siNA | GccuGAcuGGcuuuAAGuuTsT | 1771 |
| | | | | (880C) stab11 | | |
| 895 | AGGCAAGGGAUUUGUUAUCCAAA | 1496 | | MAPK8:915L21 antisense siNA | uGGAuAAcAAAucccuuGcTsT | 1772 |
| | | | | (897C) stab11 | | |
| 1224 | CAAUGUCAACAGAUCCGACUUUG | 1497 | | MAPK8:1244L21 antisense siNA | AAGucGGAucuGuuGAcAuTsT | 1773 |
| | | | | (1226C) stab11 | | |
| 1242 | CUUUGGCCUCUGAUACAGACAGC | 1498 | | MAPK8:1262L21 antisense siNA | uGucuGuAucAGAGGccAATsT | 1774 |
| | | | | (1244C) stab11 | | |
| 25 | GAAGCAAGCGUGACAACAAUUUU | 1491 | | MAPK8:27U21 sense siNA stab18 | B AGcAAGcGuGAcAAcAAuuTT B | 1775 |
| 733 | AACAGCUUGGAACACCAUGUCCU | 1492 | | MAPK8:735U21 sense siNA stab18 | B cAGcuuGGAAcAccAuGucTT B | 1776 |
| 852 | CUUUUCCCAGCUGACUCAGAACA | 1493 | | MAPK8:854U21 sense siNA stab18 | B uuucccAGcuGAcucAGAATT B | 1777 |
| 853 | UUUUCCCAGCUGACUCAGAACAC | 1494 | | MAPK8:855U21 sense siNA stab18 | B uucccAGcuGAcucAGAAcTT B | 1778 |
| 878 | CAAACUUAAAGCCAGUCAGGCAA | 1495 | | MAPK8:880U21 sense siNA stab18 | B AAcuuAAAGccAGucAGGcTT B | 1779 |
| 895 | AGGCAAGGGAUUUGUUAUCCAAA | 1496 | | MAPK8:897U21 sense siNA stab18 | B GcAAGGGAuuuGuuAuccATT B | 1780 |
| 1224 | CAAUGUCAACAGAUCCGACUUUG | 1497 | | MAPK8:1226U21 sense siNA stab18 | B AuGucAAcAGAuccGAcuuTT B | 1781 |
| 1242 | CUUUGGCCUCUGAUACAGACAGC | 1498 | | MAPK8:1244U21 sense siNA stab18 | B uuGGccucuGAuAcAGAcATT B | 1782 |
| 25 | GAAGCAAGCGUGACAACAAUUUU | 1491 | | MAPK8:45L21 antisense siNA | AAuuGuuGucAcGcuuGcuTsT | 1783 |
| | | | | (27C) stab08 | | |
| 733 | AACAGCUUGGAACACCAUGUCCU | 1492 | | MAPK8:753L21 antisense siNA | GAcAuGGuGuuccAAGcuGTsT | 1784 |
| | | | | (735C) stab08 | | |
| 852 | CUUUUCCCAGCUGACUCAGAACA | 1493 | | MAPK8:872L21 antisense siNA | uucuGAGucAGcuGGGAAATsT | 1785 |
| | | | | (854C) stab08 | | |
| 853 | UUUUCCCAGCUGACUCAGAACAC | 1494 | | MAPK8:873L21 antisense siNA | GuucuGAGucAGcuGGGAATsT | 1786 |
| | | | | (855C) stab08 | | |
| 878 | CAAACUUAAAGCCAGUCAGGCAA | 1495 | | MAPK8:898L21 antisense siNA | GccuGAcuGGcuuuAAGuuTsT | 1787 |
| | | | | (880C) stab08 | | |
| 895 | AGGCAAGGGAUUUGUUAUCCAAA | 1496 | | MAPK8:915L21 antisense siNA | uGGAuAAcAAAucccuuGcTsT | 1788 |
| | | | | (897C) stab08 | | |
| 1224 | CAAUGUCAACAGAUCCGACUUUG | 1497 | 31872 | MAPK8:1244L21 antisense siNA | AAGucGGAucuGuuGAcAuTsT | 1789 |
| | | | | (1226C) stab08 | | |
| 1242 | CUUUGGCCUCUGAUACAGACAGC | 1498 | | MAPK8:1262L21 antisense siNA | uGucuGuAucAGAGGccAATsT | 1790 |
| | | | | (1244C) stab08 | | |
| 25 | GAAGCAAGCGUGACAACAAUUUU | 1491 | | MAPK8:27U21 sense siNA stab09 | B AGCAAGCGUGACAACAAUUTT B | 1791 |
| 733 | AACAGCUUGGAACACCAUGUCCU | 1492 | | MAPK8:735U21 sense siNA stab09 | B CAGCUUGGAACACCAUGUCTT B | 1792 |
| 852 | CUUUUCCCAGCUGACUCAGAACA | 1493 | | MAPK8:854U21 sense siNA stab09 | B UUUCCCAGCUGACUCAGAATT B | 1793 |
| 853 | UUUUCCCAGCUGACUCAGAACAC | 1494 | | MAPK8:855U21 sense siNA stab09 | B UUCCCAGCUGACUCAGAACTT B | 1794 |
| 878 | CAAACUUAAAGCCAGUCAGGCAA | 1495 | | MAPK8:880U21 sense siNA stab09 | B AACUUAAAGCCAGUCAGGCTT B | 1795 |
| 895 | AGGCAAGGGAUUUGUUAUCCAAA | 1496 | | MAPK8:897U21 sense siNA stab09 | B GCAAGGGAUUUGUUAUCCATT B | 1796 |
| 1224 | CAAUGUCAACAGAUCCGACUUUG | 1497 | | MAPK8:1226U21 sense siNA stab09 | B AUGUCAACAGAUCCGACUUTT B | 1797 |
| 1242 | CUUUGGCCUCUGAUACAGACAGC | 1498 | | MAPK8:1244U21 sense siNA stab09 | B UUGGCCUCUGAUACAGACATT B | 1798 |
| 25 | GAAGCAAGCGUGACAACAAUUUU | 1491 | | MAPK8:45L21 antisense siNA | AAUUGUUGUCACGCUUGCUTsT | 1799 |
| | | | | (27C) stab10 | | |
| 733 | AACAGCUUGGAACACCAUGUCCU | 1492 | | MAPK8:753L21 antisense siNA | GACAUGGUGUUCCAAGCUGTsT | 1800 |
| | | | | (735C) stab10 | | |
| 852 | CUUUUCCCAGCUGACUCAGAACA | 1493 | | MAPK8:872L21 antisense siNA | UUCUGAGUCAGCUGGGAAATsT | 1801 |
| | | | | (854C) stab10 | | |
| 853 | UUUUCCCAGCUGACUCAGAACAC | 1494 | | MAPK8:873L21 antisense siNA | GUUCUGAGUCAGCUGGGAATsT | 1802 |
| | | | | (855C) stab10 | | |
| 878 | CAAACUUAAAGCCAGUCAGGCAA | 1495 | | MAPK8:898L21 antisense siNA | GCCUGACUGGCUUUAAGUUTsT | 1803 |
| | | | | (880C) stab10 | | |
| 895 | AGGCAAGGGAUUUGUUAUCCAAA | 1496 | | MAPK8:915L21 antisense siNA | UGGAUAACAAAUCCCUUGCTsT | 1804 |
| | | | | (897C) stab10 | | |
| 1224 | CAAUGUCAACAGAUCCGACUUUG | 1497 | | MAPK8:1244L21 antisense siNA | AAGUCGGAUCUGUUGACAUTsT | 1805 |
| | | | | (1226C) stab10 | | |
| 1242 | CUUUGGCCUCUGAUACAGACAGC | 1498 | | MAPK8:1262L21 antisense siNA | UGUCUGUAUCAGAGGCCAATsT | 1806 |
| | | | | (1244C) stab10 | | |
| 25 | GAAGCAAGCGUGACAACAAUUUU | 1491 | | MAPK8:45L21 antisense siNA | AAuuGuuGucAcGcuuGcuTT B | 1807 |
| | | | | (27C) stab19 | | |
| 733 | AACAGCUUGGAACACCAUGUCCU | 1492 | | MAPK8:753L21 antisense siNA | GAcAuGGuGuuccAAGcuGTT B | 1808 |
| | | | | (735C) stab19 | | |
| 852 | CUUUUCCCAGCUGACUCAGAACA | 1493 | | MAPK8:872L21 antisense siNA | uucuGAGucAGcuGGGAAATT B | 1809 |
| | | | | (854C) stab19 | | |
| 853 | UUUUCCCAGCUGACUCAGAACAC | 1494 | | MAPK8:873L21 antisense siNA | GuucuGAGucAGcuGGGAATT B | 1810 |
| | | | | (855C) stab19 | | |
| 878 | CAAACUUAAAGCCAGUCAGGCAA | 1495 | | MAPK8:898L21 antisense siNA | GccuGAcuGGcuuuAAGuuTT B | 1811 |
| | | | | (880C) stab19 | | |
| 895 | AGGCAAGGGAUUUGUUAUCCAAA | 1496 | | MAPK8:915L21 antisense siNA | uGGAuAAcAAAucccuuGcTT B | 1812 |
| | | | | (897C) stab19 | | |
| 1224 | CAAUGUCAACAGAUCCGACUUUG | 1497 | | MAPK8:1244L21 antisense siNA | AAGucGGAucuGuuGAcAuTT B | 1813 |
| | | | | (1226C) stab19 | | |
| 1242 | CUUUGGCCUCUGAUACAGACAGC | 1498 | | MAPK8:1262L21 antisense siNA | uGucuGuAucAGAGGccAATT B | 1814 |
| | | | | (1244C) stab19 | | |
| 25 | GAAGCAAGCGUGACAACAAUUUU | 1491 | | MAPK8:45L21 antisense siNA | AAUUGUUGUCACGCUUGCUTT B | 1815 |
| | | | | (27C) stab22 | | |
| 733 | AACAGCUUGGAACACCAUGUCCU | 1492 | | MAPK8:753L21 antisense siNA | GACAUGGUGUUCCAAGCUGTT B | 1816 |
| | | | | (735C) stab22 | | |
| 852 | CUUUUCCCAGCUGACUCAGAACA | 1493 | | MAPK8:872L21 antisense siNA | UUCUGAGUCAGCUGGGAAATT B | 1817 |
| | | | | (854C) stab22 | | |
| 853 | UUUUCCCAGCUGACUCAGAACAC | 1494 | | MAPK8:873L21 antisense siNA | GUUCUGAGUCAGCUGGGAATT B | 1818 |
| | | | | (855C) stab22 | | |
| 878 | CAAACUUAAAGCCAGUCAGGCAA | 1495 | | MAPK8:898L21 antisense siNA | GCCUGACUGGCUUUAAGUUTT B | 1819 |
| | | | | (880C) stab22 | | |
| 895 | AGGCAAGGGAUUUGUUAUCCAAA | 1496 | | MAPK8:915L21 antisense siNA | UGGAUAACAAAUCCCUUGCTT B | 1820 |
| | | | | (897C) stab22 | | |
| 1224 | CAAUGUCAACAGAUCCGACUUUG | 1497 | | MAPK8:1244L21 antisense siNA | AAGUCGGAUCUGUUGACAUTT B | 1821 |
| | | | | (1226C) stab22 | | |
| 1242 | CUUUGGCCUCUGAUACAGACAGC | 1498 | | MAPK8:1262L21 antisense siNA | UGUCUGUAUCAGAGGCCAATT B | 1822 |
| | | | | (1244C) stab22 | | |
| 1224 | CAAUGUCAACAGAUCCGACUUUG | 1497 | 31890 | MAPK8:1226U21 sense siNA inv | B uucAGccuAGAcAAcuGuATT B | 1823 |
| | | | | stab07 | | |
| 1224 | CAAUGUCAACAGAUCCGACUUUG | 1497 | 31896 | MAPK8:1244L21 antisense siNA | uAcAGuuGucuAGGcuGAATsT | 1824 |
| | | | | (1226C) inv stab08 | | |

MAPK14-2 NM_139012

| | | | | | | |
|---|---|---|---|---|---|---|
| 1278 | GCCUACUUUGCUCAGUACCACGA | 1499 | 31586 | MAPK14:1280U21 sense siNA | CUACUUUGCUCAGUACCACTT | 1825 |
| 1609 | UGUCUGUCUUUGUGGGAGGGUAA | 1500 | 31587 | MAPK14:1611U21 sense siNA | UCUGUCUUUGUGGGAGGGUTT | 1826 |
| 1959 | ACCAACUGGCUUCUGUGCACUAG | 1501 | | MAPK14:1961U21 sense siNA | CAACUGGCUUCUGUGCACUTT | 1827 |
| 2359 | AGCAGAGUGAGGAUGUGUUUUGC | 1502 | | MAPK14:2361U21 sense siNA | CAGAGUGAGGAUGUGUUUUTT | 1828 |
| 2482 | AUCCCAUGUCACCUCAGCUGAUA | 1503 | | MAPK14:2484U21 sense siNA | CCCAUGUCACCUCAGCUGATT | 1829 |
| 2882 | AAAAGGGUCUUCUUGGCAGCUUA | 1504 | 31588 | MAPK14:2884U21 sense siNA | AAGGGUCUUCUUGGCAGCUTT | 1830 |
| 3554 | GGACUCUAAGCUGGAGCUCUUGG | 1505 | 31589 | MAPK14:3556U21 sense siNA | ACUCUAAGCUGGAGCUCUUTT | 1831 |
| 3683 | UUGGCUGUAAUCAGUUAUGCCGU | 1506 | | MAPK14:3685U21 sense siNA | GGCUGUAAUCAGUUAUGCCTT | 1832 |
| 1278 | GCCUACUUUGCUCAGUACCACGA | 1499 | 31590 | MAPK14:1298L21 antisense siNA | GUGGUACUGAGCAAAGUAGTT | 1833 |
| | | | | (1280C) | | |
| 1609 | UGUCUGUCUUUGUGGGAGGGUAA | 1500 | 31591 | MAPK14:1629L21 antisense siNA | ACCCUCCCACAAAGACAGATT | 1834 |
| | | | | (1611C) | | |
| 1959 | ACCAACUGGCUUCUGUGCACUAG | 1501 | | MAPK14:1979L21 antisense siNA | AGUGCACAGAAGCCAGUUGTT | 1835 |
| | | | | (1961C) | | |
| 2359 | AGCAGAGUGAGGAUGUGUUUUGC | 1502 | | MAPK14:2379L21 antisense siNA | AAAACACAUCCUCACUCUGTT | 1836 |
| | | | | (2361C) | | |
| 2482 | AUCCCAUGUCACCUCAGCUGAUA | 1503 | | MAPK14:2502L21 antisense siNA | UCAGCUGAGGUGACAUGGGTT | 1837 |
| | | | | (2484C) | | |
| 2882 | AAAAGGGUCUUCUUGGCAGCUUA | 1504 | 31592 | MAPK14:2902L21 antisense siNA | AGCUGCCAAGAAGACCCUUTT | 1838 |
| | | | | (2884C) | | |
| 3554 | GGACUCUAAGCUGGAGCUCUUGG | 1505 | 31593 | MAPK14:3574L21 antisense siNA | AAGAGCUCCAGCUUAGAGUTT | 1839 |
| | | | | (3556C) | | |
| 3683 | UUGGCUGUAAUCAGUUAUGCCGU | 1506 | | MAPK14:3703L21 antisense siNA | GGCAUAACUGAUUACAGCCTT | 1840 |
| | | | | (3685C) | | |
| 1278 | GCCUACUUUGCUCAGUACCACGA | 1499 | | MAPK14:1280U21 sense siNA | B cuAcuuuGcucAGuAccAcTT B | 1841 |
| | | | | stab04 | | |
| 1609 | UGUCUGUCUUUGUGGGAGGGUAA | 1500 | | MAPK14:1611U21 sense siNA | B ucuGucuuuGuGGGAGGGuTT B | 1842 |
| | | | | stab04 | | |
| 1959 | ACCAACUGGCUUCUGUGCACUAG | 1501 | | MAPK14:1961U21 sense siNA | B cAAcuGGcuucuGuGcAcuTT B | 1843 |
| | | | | stab04 | | |
| 2359 | AGCAGAGUGAGGAUGUGUUUUGC | 1502 | | MAPK14:2361U21 sense siNA | B cAGAGuGAGGAuGuGuuuuTT B | 1844 |
| | | | | stab04 | | |
| 2482 | AUCCCAUGUCACCUCAGCUGAUA | 1503 | | MAPK14:2484U21 sense siNA | B cccAuGucAccucAGcuGATT B | 1845 |
| | | | | stab04 | | |
| 2882 | AAAAGGGUCUUCUUGGCAGCUUA | 1504 | | MAPK14:2884U21 sense siNA | B AAGGGucuucuuGGcAGcuTT B | 1846 |
| | | | | stab04 | | |
| 3554 | GGACUCUAAGCUGGAGCUCUUGG | 1505 | | MAPK14:3556U21 sense siNA | B AcucuAAGcuGGAGcucuuTT B | 1847 |
| | | | | stab04 | | |
| 3683 | UUGGCUGUAAUCAGUUAUGCCGU | 1506 | | MAPK14:3685U21 sense siNA | B GGcuGuAAucAGuuAuGccTT B | 1848 |
| | | | | stab04 | | |
| 1278 | GCCUACUUUGCUCAGUACCACGA | 1499 | | MAPK14:1298L21 antisense siNA | GuGGuAcuGAGcAAAGuAGTsT | 1849 |
| | | | | (1280C) stab05 | | |
| 1609 | UGUCUGUCUUUGUGGGAGGGUAA | 1500 | | MAPK14:1629L21 antisense siNA | AcccucccAcAAAGAcAGATsT | 1850 |
| | | | | (1611C) stab05 | | |
| 1959 | ACCAACUGGCUUCUGUGCACUAG | 1501 | | MAPK14:1979L21 antisense siNA | AGuGcAcAGAAGccAGuuGTsT | 1851 |
| | | | | (1961C) stab05 | | |
| 2359 | AGCAGAGUGAGGAUGUGUUUUGC | 1502 | | MAPK14:2379L21 antisense siNA | AAAAcAcAuccucAcucuGTsT | 1852 |
| | | | | (2361C) stab05 | | |
| 2482 | AUCCCAUGUCACCUCAGCUGAUA | 1503 | | MAPK14:2502L21 antisense siNA | ucAGcuGAGGuGAcAuGGGTsT | 1853 |
| | | | | (2484C) stab05 | | |
| 2882 | AAAAGGGUCUUCUUGGCAGCUUA | 1504 | | MAPK14:2902L21 antisense siNA | AGcuGccAAGAAGAcccuuTsT | 1854 |
| | | | | (2884C) stab05 | | |
| 3554 | GGACUCUAAGCUGGAGCUCUUGG | 1505 | | MAPK14:3574L21 antisense siNA | AAGAGcuccAGcuuAGAGuTsT | 1855 |
| | | | | (3556C) stab05 | | |
| 3683 | UUGGCUGUAAUCAGUUAUGCCGU | 1506 | | MAPK14:3703L21 antisense siNA | GGcAuAAcuGAuuAcAGccTsT | 1856 |
| | | | | (3685C) stab05 | | |
| 1278 | GCCUACUUUGCUCAGUACCACGA | 1499 | | MAPK14:1280U21 sense siNA | B cuAcuuuGcucAGuAccAcTT B | 1857 |
| | | | | stab07 | | |
| 1609 | UGUCUGUCUUUGUGGGAGGGUAA | 1500 | | MAPK14:1611U21 sense siNA | B ucuGucuuuGuGGGAGGGuTT B | 1858 |
| | | | | stab07 | | |
| 1959 | ACCAACUGGCUUCUGUGCACUAG | 1501 | | MAPK14:1961U21 sense siNA | B cAAcuGGcuucuGuGcAcuTT B | 1859 |
| | | | | stab07 | | |
| 2359 | AGCAGAGUGAGGAUGUGUUUUGC | 1502 | | MAPK14:2361U21 sense siNA | B cAGAGuGAGGAuGuGuuuuTT B | 1860 |
| | | | | stab07 | | |
| 2482 | AUCCCAUGUCACCUCAGCUGAUA | 1503 | | MAPK14:2484U21 sense siNA | B cccAuGucAccucAGcuGATT B | 1861 |
| | | | | stab07 | | |
| 2882 | AAAAGGGUCUUCUUGGCAGCUUA | 1504 | | MAPK14:2884U21 sense siNA | B AAGGGucuucuuGGcAGcuTT B | 1862 |
| | | | | stab07 | | |
| 3554 | GGACUCUAAGCUGGAGCUCUUGG | 1505 | | MAPK14:3556U21 sense siNA | B AcucuAAGcuGGAGcucuuTT B | 1863 |
| | | | | stab07 | | |
| 3683 | UUGGCUGUAAUCAGUUAUGCCGU | 1506 | | MAPK14:3685U21 sense siNA | B GGcuGuAAucAGuuAuGccTT B | 1864 |
| | | | | stab07 | | |
| 1278 | GCCUACUUUGCUCAGUACCACGA | 1499 | | MAPK14:1298L21 antisense siNA | GuGGuAcuGAGcAAAGuAGTsT | 1865 |
| | | | | (1280C) stab11 | | |
| 1609 | UGUCUGUCUUUGUGGGAGGGUAA | 1500 | | MAPK14:1629L21 antisense siNA | AcccucccAcAAAGAcAGATsT | 1866 |
| | | | | (1611C) stab11 | | |
| 1959 | ACCAACUGGCUUCUGUGCACUAG | 1501 | | MAPK14:1979L21 antisense siNA | AGuGcAcAGAAGccAGuuGTsT | 1867 |
| | | | | (1961C) stab11 | | |
| 2359 | AGCAGAGUGAGGAUGUGUUUUGC | 1502 | | MAPK14:2379L21 antisense siNA | AAAAcAcAuccucAcucuGTsT | 1868 |
| | | | | (2361C) stab11 | | |
| 2482 | AUCCCAUGUCACCUCAGCUGAUA | 1503 | | MAPK14:2502L21 antisense siNA | ucAGcuGAGGuGAcAuGGGTsT | 1869 |
| | | | | (2484C) stab11 | | |
| 2882 | AAAAGGGUCUUCUUGGCAGCUUA | 1504 | | MAPK14:2902L21 antisense siNA | AGcuGccAAGAAGAcccuuTsT | 1870 |
| | | | | (2884C) stab11 | | |
| 3554 | GGACUCUAAGCUGGAGCUCUUGG | 1505 | | MAPK14:3574L21 antisense siNA | AAGAGcuccAGcuuAGAGuTsT | 1871 |
| | | | | (3556C) stab11 | | |
| 3683 | UUGGCUGUAAUCAGUUAUGCCGU | 1506 | | MAPK14:3703L21 antisense siNA | GGcAuAAcuGAuuAcAGccTsT | 1872 |
| | | | | (3685C) stab11 | | |
| 1278 | GCCUACUUUGCUCAGUACCACGA | 1499 | | MAPK14:1280U21 sense siNA | B cuAcuuuGcucAGuAccAcTT B | 1873 |
| | | | | stab18 | | |
| 1609 | UGUCUGUCUUUGUGGGAGGGUAA | 1500 | | MAPK14:1611U21 sense siNA | B ucuGucuuuGuGGGAGGGuTT B | 1874 |
| | | | | stab18 | | |
| 1959 | ACCAACUGGCUUCUGUGCACUAG | 1501 | | MAPK14:1961U21 sense siNA | B cAAcuGGcuucuGuGcAcuTT B | 1875 |
| | | | | stab18 | | |
| 2359 | AGCAGAGUGAGGAUGUGUUUUGC | 1502 | | MAPK14:2361U21 sense siNA | B cAGAGuGAGGAuGuGuuuuTT B | 1876 |
| | | | | stab18 | | |
| 2482 | AUCCCAUGUCACCUCAGCUGAUA | 1503 | | MAPK14:2484U21 sense siNA | B cccAuGucAccucAGcuGATT B | 1877 |
| | | | | stab18 | | |
| 2882 | AAAAGGGUCUUCUUGGCAGCUUA | 1504 | | MAPK14:2884U21 sense siNA | B AAGGGucuucuuGGcAGcuTT B | 1878 |
| | | | | stab18 | | |
| 3554 | GGACUCUAAGCUGGAGCUCUUGG | 1505 | | MAPK14:3556U21 sense siNA | B AcucuAAGcuGGAGcucuuTT B | 1879 |
| | | | | stab18 | | |
| 3683 | UUGGCUGUAAUCAGUUAUGCCGU | 1506 | | MAPK14:3685U21 sense siNA | B GGcuGuAAucAGuuAuGccTT B | 1880 |
| | | | | stab18 | | |
| 1278 | GCCUACUUUGCUCAGUACCACGA | 1499 | | MAPK14:1298L21 antisense siNA | GuGGuAcuGAGcAAAGuAGTsT | 1881 |
| | | | | (1280C) stab08 | | |
| 1609 | UGUCUGUCUUUGUGGGAGGGUAA | 1500 | | MAPK14:1629L21 antisense siNA | AcccucccAcAAAGAcAGATsT | 1882 |
| | | | | (1611C) stab08 | | |
| 1959 | ACCAACUGGCUUCUGUGCACUAG | 1501 | | MAPK14:1979L21 antisense siNA | AGuGcAcAGAAGccAGuuGTsT | 1883 |
| | | | | (1961C) stab08 | | |
| 2359 | AGCAGAGUGAGGAUGUGUUUUGC | 1502 | | MAPK14:2379L21 antisense siNA | AAAAcAcAuccucAcucuGTsT | 1884 |
| | | | | (2361C) stab08 | | |
| 2482 | AUCCCAUGUCACCUCAGCUGAUA | 1503 | | MAPK14:2502L21 antisense siNA | ucAGcuGAGGuGAcAuGGGTsT | 1885 |
| | | | | (2484C) stab08 | | |
| 2882 | AAAAGGGUCUUCUUGGCAGCUUA | 1504 | | MAPK14:2902L21 antisense siNA | AGcuGccAAGAAGAcccuuTsT | 1886 |
| | | | | (2884C) stab08 | | |
| 3554 | GGACUCUAAGCUGGAGCUCUUGG | 1505 | | MAPK14:3574L21 antisense siNA | AAGAGcuccAGcuuAGAGuTsT | 1887 |
| | | | | (3556C) stab08 | | |
| 3683 | UUGGCUGUAAUCAGUUAUGCCGU | 1506 | | MAPK14:3703L21 antisense siNA | GGcAuAAcuGAuuAcAGccTsT | 1888 |
| | | | | (3685C) stab08 | | |
| 1278 | GCCUACUUUGCUCAGUACCACGA | 1499 | | MAPK14:1280U21 sense siNA | B CUACUUUGCUCAGUACCACTT B | 1889 |
| | | | | stab09 | | |
| 1609 | UGUCUGUCUUUGUGGGAGGGUAA | 1500 | | MAPK14:1611U21 sense siNA | B UCUGUCUUUGUGGGAGGGUTT B | 1890 |
| | | | | stab09 | | |
| 1959 | ACCAACUGGCUUCUGUGCACUAG | 1501 | | MAPK14:1961U21 sense siNA | B CAACUGGCUUCUGUGCACUTT B | 1891 |
| | | | | stab09 | | |
| 2359 | AGCAGAGUGAGGAUGUGUUUUGC | 1502 | | MAPK14:2361U21 sense siNA | B CAGAGUGAGGAUGUGUUUUTT B | 1892 |
| | | | | stab09 | | |
| 2482 | AUCCCAUGUCACCUCAGCUGAUA | 1503 | | MAPK14:2484U21 sense siNA | B CCCAUGUCACCUCAGCUGATT B | 1893 |
| | | | | stab09 | | |
| 2882 | AAAAGGGUCUUCUUGGCAGCUUA | 1504 | | MAPK14:2884U21 sense siNA | B AAGGGUCUUCUUGGCAGCUTT B | 1894 |
| | | | | stab09 | | |
| 3554 | GGACUCUAAGCUGGAGCUCUUGG | 1505 | | MAPK14:3556U21 sense siNA | B ACUCUAAGCUGGAGCUCUUTT B | 1895 |
| | | | | stab09 | | |
| 3683 | UUGGCUGUAAUCAGUUAUGCCGU | 1506 | | MAPK14:3685U21 sense siNA | B GGCUGUAAUCAGUUAUGCCTT B | 1896 |
| | | | | stab09 | | |
| 1278 | GCCUACUUUGCUCAGUACCACGA | 1499 | | MAPK14:1298L21 antisense siNA | GUGGUACUGAGCAAAGUAGTsT | 1897 |
| | | | | (1280C) stab10 | | |
| 1609 | UGUCUGUCUUUGUGGGAGGGUAA | 1500 | | MAPK14:1629L21 antisense siNA | ACCCUCCCACAAAGACAGATsT | 1898 |
| | | | | (1611C) stab10 | | |
| 1959 | ACCAACUGGCUUCUGUGCACUAG | 1501 | | MAPK14:1979L21 antisense siNA | AGUGCACAGAAGCCAGUUGTsT | 1899 |
| | | | | (1961C) stab10 | | |
| 2359 | AGCAGAGUGAGGAUGUGUUUUGC | 1502 | | MAPK14:2379L21 antisense siNA | AAAACACAUCCUCACUCUGTsT | 1900 |
| | | | | (2361C) stab10 | | |
| 2482 | AUCCCAUGUCACCUCAGCUGAUA | 1503 | | MAPK14:2502L21 antisense siNA | UCAGCUGAGGUGACAUGGGTsT | 1901 |
| | | | | (2484C) stab10 | | |
| 2882 | AAAAGGGUCUUCUUGGCAGCUUA | 1504 | | MAPK14:2902L21 antisense siNA | AGCUGCCAAGAAGACCCUUTsT | 1902 |
| | | | | (2884C) stab10 | | |
| 3554 | GGACUCUAAGCUGGAGCUCUUGG | 1505 | | MAPK14:3574L21 antisense siNA | AAGAGCUCCAGCUUAGAGUTsT | 1903 |
| | | | | (3556C) stab10 | | |
| 3683 | UUGGCUGUAAUCAGUUAUGCCGU | 1506 | | MAPK14:3703L21 antisense siNA | GGCAUAACUGAUUACAGCCTsT | 1904 |
| | | | | (3685C) stab10 | | |
| 1278 | GCCUACUUUGCUCAGUACCACGA | 1499 | | MAPK14:1298L21 antisense siNA | GuGGuAcuGAGcAAAGuAGTT B | 1905 |
| | | | | (1280C) stab19 | | |
| 1609 | UGUCUGUCUUUGUGGGAGGGUAA | 1500 | | MAPK14:1629L21 antisense siNA | AcccucccAcAAAGAcAGATT B | 1906 |
| | | | | (1611C) stab19 | | |
| 1959 | ACCAACUGGCUUCUGUGCACUAG | 1501 | | MAPK14:1979L21 antisense siNA | AGuGcAcAGAAGccAGuuGTT B | 1907 |
| | | | | (1961C) stab19 | | |
| 2359 | AGCAGAGUGAGGAUGUGUUUUGC | 1502 | | MAPK14:2379L21 antisense siNA | AAAAcAcAuccucAcucuGTT B | 1908 |
| | | | | (2361C) stab19 | | |
| 2482 | AUCCCAUGUCACCUCAGCUGAUA | 1503 | | MAPK14:2502L21 antisense siNA | ucAGcuGAGGuGAcAuGGGTT B | 1909 |
| | | | | (2484C) stab19 | | |
| 2882 | AAAAGGGUCUUCUUGGCAGCUUA | 1504 | | MAPK14:2902L21 antisense siNA | AGcuGccAAGAAGAcccuuTT B | 1910 |
| | | | | (2884C) stab19 | | |
| 3554 | GGACUCUAAGCUGGAGCUCUUGG | 1505 | | MAPK14:3574L21 antisense siNA | AAGAGcuccAGcuuAGAGuTT B | 1911 |
| | | | | (3556C) stab19 | | |
| 3683 | UUGGCUGUAAUCAGUUAUGCCGU | 1506 | | MAPK14:3703L21 antisense siNA | GGcAuAAcuGAuuAcAGccTT B | 1912 |
| | | | | (3685C) stab19 | | |
| 1278 | GCCUACUUUGCUCAGUACCACGA | 1499 | | MAPK14:1298L21 antisense siNA | GUGGUACUGAGCAAAGUAGTT B | 1913 |
| | | | | (1280C) stab22 | | |
| 1609 | UGUCUGUCUUUGUGGGAGGGUAA | 1500 | | MAPK14:1629L21 antisense siNA | ACCCUCCCACAAAGACAGATT B | 1914 |
| | | | | (1611C) stab22 | | |
| 1959 | ACCAACUGGCUUCUGUGCACUAG | 1501 | | MAPK14:1979L21 antisense siNA | AGUGCACAGAAGCCAGUUGTT B | 1915 |
| | | | | (1961C) stab22 | | |
| 2359 | AGCAGAGUGAGGAUGUGUUUUGC | 1502 | | MAPK14:2379L21 antisense siNA | AAAACACAUCCUCACUCUGTT B | 1916 |
| | | | | (2361C) stab22 | | |
| 2482 | AUCCCAUGUCACCUCAGCUGAUA | 1503 | | MAPK14:2502L21 antisense siNA | UCAGCUGAGGUGACAUGGGTT B | 1917 |
| | | | | (2484C) stab22 | | |
| 2882 | AAAAGGGUCUUCUUGGCAGCUUA | 1504 | | MAPK14:2902L21 antisense siNA | AGCUGCCAAGAAGACCCUUTT B | 1918 |
| | | | | (2884C) stab22 | | |
| 3554 | GGACUCUAAGCUGGAGCUCUUGG | 1505 | | MAPK14:3574L21 antisense siNA | AAGAGCUCCAGCUUAGAGUTT B | 1919 |
| | | | | (3556C) stab22 | | |
| 3683 | UUGGCUGUAAUCAGUUAUGCCGU | 1506 | | MAPK14:3703L21 antisense siNA | GGCAUAACUGAUUACAGCCTT B | 1920 |
| | | | | (3685C) stab22 | | |

JUN NM_002228

| | | | | | | |
|---|---|---|---|---|---|---|
| 703 | AGUGACCGCGACUUUUCAAAGCC | 1507 | | JUN:705U21 sense siNA | UGACCGCGACUUUUCAAAGTT | 1921 |
| 1486 | CAAACCUCAGCAACUUCAACCCA | 1508 | | JUN:1488U21 sense siNA | AACCUCAGCAACUUCAACCTT | 1922 |
| 1487 | AAACCUCAGCAACUUCAACCCAG | 1509 | | JUN:1489U21 sense siNA | ACCUCAGCAACUUCAACCCTT | 1923 |
| 1816 | AGGAAAAAGUGAAAACCUUGAAA | 1510 | | JUN:1818U21 sense siNA | GAAAAAGUGAAAACCUUGATT | 1924 |
| 1817 | GGAAAAAGUGAAAACCUUGAAAG | 1511 | | JUN:1819U21 sense siNA | AAAAAGUGAAAACCUUGAATT | 1925 |
| 1875 | CUCAGGGAACAGGUGGCACAGCU | 1512 | | JUN:1877U21 sense siNA | CAGGGAACAGGUGGCACAGTT | 1926 |
| 1901 | ACAGAAAGUCAUGAACCACGUUA | 1513 | | JUN:1903U21 sense siNA | AGAAAGUCAUGAACCACGUTT | 1927 |
| 1902 | CAGAAAGUCAUGAACCACGUUAA | 1514 | | JUN:1904U21 sense siNA | GAAAGUCAUGAACCACGUUTT | 1928 |
| 1904 | GAAAGUCAUGAACCACGUUAACA | 1515 | | JUN:1906U21 sense siNA | AAGUCAUGAACCACGUUAATT | 1929 |
| 1907 | AGUCAUGAACCACGUUAACAGUG | 1516 | | JUN:1909U21 sense siNA | UCAUGAACCACGUUAACAGTT | 1930 |
| 1924 | ACAGUGGGUGCCAACUCAUGCUA | 1517 | | JUN:1926U21 sense siNA | AGUGGGUGCCAACUCAUGCTT | 1931 |
| 1930 | GGUGCCAACUCAUGCUAACGCAG | 1518 | | JUN:1932U21 sense siNA | UGCCAACUCAUGCUAACGCTT | 1932 |
| 1931 | GUGCCAACUCAUGCUAACGCAGC | 1519 | | JUN:1933U21 sense siNA | GCCAACUCAUGCUAACGCATT | 1933 |
| 1933 | GCCAACUCAUGCUAACGCAGCAG | 1520 | | JUN:1935U21 sense siNA | CAACUCAUGCUAACGCAGCTT | 1934 |
| 1934 | CCAACUCAUGCUAACGCAGCAGU | 1521 | | JUN:1936U21 sense siNA | AACUCAUGCUAACGCAGCATT | 1935 |
| 1935 | CAACUCAUGCUAACGCAGCAGUU | 1522 | | JUN:1937U21 sense siNA | ACUCAUGCUAACGCAGCAGTT | 1936 |
| 2257 | AACAUUGACCAAGAACUGCAUGG | 1523 | | JUN:2259U21 sense siNA | CAUUGACCAAGAACUGCAUTT | 1937 |
| 2258 | ACAUUGACCAAGAACUGCAUGGA | 1524 | | JUN:2260U21 sense siNA | AUUGACCAAGAACUGCAUGTT | 1938 |
| 2259 | CAUUGACCAAGAACUGCAUGGAC | 1525 | | JUN:2261U21 sense siNA | UUGACCAAGAACUGCAUGGTT | 1939 |
| 2260 | AUUGACCAAGAACUGCAUGGACC | 1526 | | JUN:2262U21 sense siNA | UGACCAAGAACUGCAUGGATT | 1940 |
| 2262 | UGACCAAGAACUGCAUGGACCUA | 1527 | | JUN:2264U21 sense siNA | ACCAAGAACUGCAUGGACCTT | 1941 |
| 2264 | ACCAAGAACUGCAUGGACCUAAC | 1528 | | JUN:2266U21 sense siNA | CAAGAACUGCAUGGACCUATT | 1942 |
| 2266 | CAAGAACUGCAUGGACCUAACAU | 1529 | | JUN:2268U21 sense siNA | AGAACUGCAUGGACCUAACTT | 1943 |
| 2268 | AGAACUGCAUGGACCUAACAUUC | 1530 | | JUN:2270U21 sense siNA | AACUGCAUGGACCUAACAUTT | 1944 |
| 2269 | GAACUGCAUGGACCUAACAUUCG | 1531 | 32010 | JUN:2271U21 sense siNA | ACUGCAUGGACCUAACAUUTT | 1945 |
| 2270 | AACUGCAUGGACCUAACAUUCGA | 1532 | | JUN:2272U21 sense siNA | CUGCAUGGACCUAACAUUCTT | 1946 |
| 2272 | CUGCAUGGACCUAACAUUCGAUC | 1533 | 32011 | JUN:2274U21 sense siNA | GCAUGGACCUAACAUUCGATT | 1947 |
| 2274 | GCAUGGACCUAACAUUCGAUCUC | 1534 | | JUN:2276U21 sense siNA | AUGGACCUAACAUUCGAUCTT | 1948 |
| 703 | AGUGACCGCGACUUUUCAAAGCC | 1507 | | JUN:723L21 antisense siNA | CUUUGAAAAGUCGCGGUCATT | 1949 |
| | | | | (705C) | | |
| 1486 | CAAACCUCAGCAACUUCAACCCA | 1508 | | JUN:1506L21 antisense siNA | GGUUGAAGUUGCUGAGGUUTT | 1950 |
| | | | | (1488C) | | |
| 1487 | AAACCUCAGCAACUUCAACCCAG | 1509 | | JUN:1507L21 antisense siNA | GGGUUGAAGUUGCUGAGGUTT | 1951 |
| | | | | (1489C) | | |
| 1816 | AGGAAAAAGUGAAAACCUUGAAA | 1510 | | JUN:1836L21 antisense siNA | UCAAGGUUUUCACUUUUUCTT | 1952 |
| | | | | (1818C) | | |
| 1817 | GGAAAAAGUGAAAACCUUGAAAG | 1511 | | JUN:1837L21 antisense siNA | UUCAAGGUUUUCACUUUUUTT | 1953 |
| | | | | (1819C) | | |
| 1875 | CUCAGGGAACAGGUGGCACAGCU | 1512 | | JUN:1895L21 antisense siNA | CUGUGCCACCUGUUCCCUGTT | 1954 |
| | | | | (1877C) | | |
| 1901 | ACAGAAAGUCAUGAACCACGUUA | 1513 | | JUN:1921L21 antisense siNA | ACGUGGUUCAUGACUUUCUTT | 1955 |
| | | | | (1903C) | | |
| 1902 | CAGAAAGUCAUGAACCACGUUAA | 1514 | | JUN:1922L21 antisense siNA | AACGUGGUUCAUGACUUUCTT | 1956 |
| | | | | (1904C) | | |
| 1904 | GAAAGUCAUGAACCACGUUAACA | 1515 | | JUN:1924L21 antisense siNA | UUAACGUGGUUCAUGACUUTT | 1957 |
| | | | | (1906C) | | |
| 1907 | AGUCAUGAACCACGUUAACAGUG | 1516 | | JUN:1927L21 antisense siNA | CUGUUAACGUGGUUCAUGATT | 1958 |
| | | | | (1909C) | | |
| 1924 | ACAGUGGGUGCCAACUCAUGCUA | 1517 | | JUN:1944L21 antisense siNA | GCAUGAGUUGGCACCCACUTT | 1959 |
| | | | | (1926C) | | |
| 1930 | GGUGCCAACUCAUGCUAACGCAG | 1518 | | JUN:1950L21 antisense siNA | GCGUUAGCAUGAGUUGGCATT | 1960 |
| | | | | (1932C) | | |
| 1931 | GUGCCAACUCAUGCUAACGCAGC | 1519 | | JUN:1951L21 antisense siNA | UGCGUUAGCAUGAGUUGGCTT | 1961 |
| | | | | (1933C) | | |
| 1933 | GCCAACUCAUGCUAACGCAGCAG | 1520 | | JUN:1953L21 antisense siNA | GCUGCGUUAGCAUGAGUUGTT | 1962 |
| | | | | (1935C) | | |
| 1934 | CCAACUCAUGCUAACGCAGCAGU | 1521 | | JUN:1954L21 antisense siNA | UGCUGCGUUAGCAUGAGUUTT | 1963 |
| | | | | (1936C) | | |
| 1935 | CAACUCAUGCUAACGCAGCAGUU | 1522 | | JUN:1955L21 antisense siNA | CUGCUGCGUUAGCAUGAGUTT | 1964 |
| | | | | (1937C) | | |
| 2257 | AACAUUGACCAAGAACUGCAUGG | 1523 | | JUN:2277L21 antisense siNA | AUGCAGUUCUUGGUCAAUGTT | 1965 |
| | | | | (2259C) | | |
| 2258 | ACAUUGACCAAGAACUGCAUGGA | 1524 | | JUN:2278L21 antisense siNA | CAUGCAGUUCUUGGUCAAUTT | 1966 |
| | | | | (2260C) | | |
| 2259 | CAUUGACCAAGAACUGCAUGGAC | 1525 | | JUN:2279L21 antisense siNA | CCAUGCAGUUCUUGGUCAATT | 1967 |
| | | | | (2261C) | | |
| 2260 | AUUGACCAAGAACUGCAUGGACC | 1526 | | JUN:2280L21 antisense siNA | UCCAUGCAGUUCUUGGUCATT | 1968 |
| | | | | (2262C) | | |
| 2262 | UGACCAAGAACUGCAUGGACCUA | 1527 | | JUN:2282L21 antisense siNA | GGUCCAUGCAGUUCUUGGUTT | 1969 |
| | | | | (2264C) | | |
| 2264 | ACCAAGAACUGCAUGGACCUAAC | 1528 | | JUN:2284L21 antisense siNA | UAGGUCCAUGCAGUUCUUGTT | 1970 |
| | | | | (2266C) | | |
| 2266 | CAAGAACUGCAUGGACCUAACAU | 1529 | | JUN:2286L21 antisense siNA | GUUAGGUCCAUGCAGUUCUTT | 1971 |
| | | | | (2268C) | | |
| 2268 | AGAACUGCAUGGACCUAACAUUC | 1530 | | JUN:2288L21 antisense siNA | AUGUUAGGUCCAUGCAGUUTT | 1972 |
| | | | | (2270C) | | |
| 2269 | GAACUGCAUGGACCUAACAUUCG | 1531 | 32012 | JUN:2289L21 antisense siNA | AAUGUUAGGUCCAUGCAGUTT | 1973 |
| | | | | (2271C) | | |
| 2270 | AACUGCAUGGACCUAACAUUCGA | 1532 | | JUN:2290L21 antisense siNA | GAAUGUUAGGUCCAUGCAGTT | 1974 |
| | | | | (2272C) | | |
| 2272 | CUGCAUGGACCUAACAUUCGAUC | 1533 | 32013 | JUN:2292L21 antisense siNA | UCGAAUGUUAGGUCCAUGCTT | 1975 |
| | | | | (2274C) | | |
| 2274 | GCAUGGACCUAACAUUCGAUCUC | 1534 | | JUN:2294L21 antisense siNA | GAUCGAAUGUUAGGUCCAUTT | 1976 |
| | | | | (2276C) | | |
| 703 | AGUGACCGCGACUUUUCAAAGCC | 1507 | | JUN:705U21 sense siNA stab04 | B uGAccGcGAcuuuucAAAGTT B | 1977 |
| 1486 | CAAACCUCAGCAACUUCAACCCA | 1508 | | JUN:1488U21 sense siNA stab04 | B AAccucAGcAAcuucAAccTT B | 1978 |
| 1487 | AAACCUCAGCAACUUCAACCCAG | 1509 | | JUN:1489U21 sense siNA stab04 | B AccucAGcAAcuucAAcccTT B | 1979 |
| 1816 | AGGAAAAAGUGAAAACCUUGAAA | 1510 | | JUN:1818U21 sense siNA stab04 | B GAAAAAGuGAAAAccuuGATT B | 1980 |
| 1817 | GGAAAAAGUGAAAACCUUGAAAG | 1511 | | JUN:1819U21 sense siNA stab04 | B AAAAAGuGAAAAccuuGAATT B | 1981 |
| 1875 | CUCAGGGAACAGGUGGCACAGCU | 1512 | | JUN:1877U21 sense siNA stab04 | B cAGGGAAcAGGuGGcAcAGTT B | 1982 |
| 1901 | ACAGAAAGUCAUGAACCACGUUA | 1513 | | JUN:1903U21 sense siNA stab04 | B AGAAAGucAuGAAccAcGuTT B | 1983 |
| 1902 | CAGAAAGUCAUGAACCACGUUAA | 1514 | | JUN:1904U21 sense siNA stab04 | B GAAAGucAuGAAccAcGuuTT B | 1984 |
| 1904 | GAAAGUCAUGAACCACGUUAACA | 1515 | | JUN:1906U21 sense siNA stab04 | B AAGucAuGAAccAcGuuAATT B | 1985 |
| 1907 | AGUCAUGAACCACGUUAACAGUG | 1516 | | JUN:1909U21 sense siNA stab04 | B ucAuGAAccAcGuuAAcAGTT B | 1986 |
| 1924 | ACAGUGGGUGCCAACUCAUGCUA | 1517 | | JUN:1926U21 sense siNA stab04 | B AGuGGGuGccAAcucAuGcTT B | 1987 |
| 1930 | GGUGCCAACUCAUGCUAACGCAG | 1518 | | JUN:1932U21 sense siNA stab04 | B uGccAAcucAuGcuAAcGcTT B | 1988 |
| 1931 | GUGCCAACUCAUGCUAACGCAGC | 1519 | | JUN:1933U21 sense siNA stab04 | B GccAAcucAuGcuAAcGcATT B | 1989 |
| 1933 | GCCAACUCAUGCUAACGCAGCAG | 1520 | | JUN:1935U21 sense siNA stab04 | B cAAcucAuGcuAAcGcAGcTT B | 1990 |
| 1934 | CCAACUCAUGCUAACGCAGCAGU | 1521 | | JUN:1936U21 sense siNA stab04 | B AAcucAuGcuAAcGcAGcATT B | 1991 |
| 1935 | CAACUCAUGCUAACGCAGCAGUU | 1522 | | JUN:1937U21 sense siNA stab04 | B AcucAuGcuAAcGcAGcAGTT B | 1992 |
| 2257 | AACAUUGACCAAGAACUGCAUGG | 1523 | | JUN:2259U21 sense siNA stab04 | B cAuuGAccAAGAAcuGcAuTT B | 1993 |
| 2258 | ACAUUGACCAAGAACUGCAUGGA | 1524 | | JUN:2260U21 sense siNA stab04 | B AuuGAccAAGAAcuGcAuGTT B | 1994 |
| 2259 | CAUUGACCAAGAACUGCAUGGAC | 1525 | | JUN:2261U21 sense siNA stab04 | B uuGAccAAGAAcuGcAuGGTT B | 1995 |
| 2260 | AUUGACCAAGAACUGCAUGGACC | 1526 | | JUN:2262U21 sense siNA stab04 | B uGAccAAGAAcuGcAuGGATT B | 1996 |
| 2262 | UGACCAAGAACUGCAUGGACCUA | 1527 | | JUN:2264U21 sense siNA stab04 | B AccAAGAAcuGcAuGGAccTT B | 1997 |
| 2264 | ACCAAGAACUGCAUGGACCUAAC | 1528 | | JUN:2266U21 sense siNA stab04 | B cAAGAAcuGcAuGGAccuATT B | 1998 |
| 2266 | CAAGAACUGCAUGGACCUAACAU | 1529 | | JUN:2268U21 sense siNA stab04 | B AGAAcuGcAuGGAccuAAcTT B | 1999 |
| 2268 | AGAACUGCAUGGACCUAACAUUC | 1530 | | JUN:2270U21 sense siNA stab04 | B AAcuGcAuGGAccuAAcAuTT B | 2000 |
| 2269 | GAACUGCAUGGACCUAACAUUCG | 1531 | 32014 | JUN:2271U21 sense siNA stab04 | B AcuGcAuGGAccuAAcAuuTT B | 2001 |
| 2270 | AACUGCAUGGACCUAACAUUCGA | 1532 | | JUN:2272U21 sense siNA stab04 | B cuGcAuGGAccuAAcAuucTT B | 2002 |
| 2272 | CUGCAUGGACCUAACAUUCGAUC | 1533 | 32015 | JUN:2274U21 sense siNA stab04 | B GcAuGGAccuAAcAuucGATT B | 2003 |
| 2274 | GCAUGGACCUAACAUUCGAUCUC | 1534 | | JUN:2276U21 sense siNA stab04 | B AuGGAccuAAcAuucGAucTT B | 2004 |
| 703 | AGUGACCGCGACUUUUCAAAGCC | 1507 | | JUN:723L21 antisense siNA | cuuuGAAAAGucGcGGucATsT | 2005 |
| | | | | (705C) stab05 | | |
| 1486 | CAAACCUCAGCAACUUCAACCCA | 1508 | | JUN:1506L21 antisense siNA | GGuuGAAGuuGcuGAGGuuTsT | 2006 |
| | | | | (1488C) stab05 | | |
| 1487 | AAACCUCAGCAACUUCAACCCAG | 1509 | | JUN:1507L21 antisense siNA | GGGuuGAAGuuGcuGAGGuTsT | 2007 |
| | | | | (1489C) stab05 | | |
| 1816 | AGGAAAAAGUGAAAACCUUGAAA | 1510 | | JUN:1836L21 antisense siNA | ucAAGGuuuucAcuuuuucTsT | 2008 |
| | | | | (1818C) stab05 | | |
| 1817 | GGAAAAAGUGAAAACCUUGAAAG | 1511 | | JUN:1837L21 antisense siNA | uucAAGGuuuucAcuuuuuTsT | 2009 |
| | | | | (1819C) stab05 | | |
| 1875 | CUCAGGGAACAGGUGGCACAGCU | 1512 | | JUN:1895L21 antisense siNA | cuGuGccAccuGuucccuGTsT | 2010 |
| | | | | (1877C) stab05 | | |
| 1901 | ACAGAAAGUCAUGAACCACGUUA | 1513 | | JUN:1921L21 antisense siNA | AcGuGGuucAuGAcuuucuTsT | 2011 |
| | | | | (1903C) stab05 | | |
| 1902 | CAGAAAGUCAUGAACCACGUUAA | 1514 | | JUN:1922L21 antisense siNA | AAcGuGGuucAuGAcuuucTsT | 2012 |
| | | | | (1904C) stab05 | | |
| 1904 | GAAAGUCAUGAACCACGUUAACA | 1515 | | JUN:1924L21 antisense siNA | uuAAcGuGGuucAuGAcuuTsT | 2013 |
| | | | | (1906C) stab05 | | |
| 1907 | AGUCAUGAACCACGUUAACAGUG | 1516 | | JUN:1927L21 antisense siNA | cuGuuAAcGuGGuucAuGATsT | 2014 |
| | | | | (1909C) stab05 | | |
| 1924 | ACAGUGGGUGCCAACUCAUGCUA | 1517 | | JUN:1944L21 antisense siNA | GcAuGAGuuGGcAcccAcuTsT | 2015 |
| | | | | (1926C) stab05 | | |
| 1930 | GGUGCCAACUCAUGCUAACGCAG | 1518 | | JUN:1950L21 antisense siNA | GcGuuAGcAuGAGuuGGcATsT | 2016 |
| | | | | (1932C) stab05 | | |
| 1931 | GUGCCAACUAUGCUAACGCAGC | 1519 | | JUN:1951L21 antisense siNA | uGcGuuAGcAuGAGuuGGcTsT | 2017 |
| | | | | (1933C) stab05 | | |
| 1933 | GCCAACUCAUGCUAACGCAGCAG | 1520 | | JUN:1953L21 antisense siNA | GcuGcGuuAGcAuGAGuuGTsT | 2018 |
| | | | | (1935C) stab05 | | |
| 1934 | CCAACUCAUGCUAACGCAGCAGU | 1521 | | JUN:1954L21 antisense siNA | uGcuGcGuuAGcAuGAGuuTsT | 2019 |
| | | | | (1936C) stab05 | | |
| 1935 | CAACUCAUGCUAACGCAGCAGUU | 1522 | | JUN:1955L21 antisense siNA | cuGcuGcGuuAGcAuGAGuTsT | 2020 |
| | | | | (1937C) stab05 | | |
| 2257 | AACAUUGACCAAGAACUGCAUGG | 1523 | | JUN:2277L21 antisense siNA | AuGcAGuucuuGGucAAuGTsT | 2021 |
| | | | | (2259C) stab05 | | |
| 2258 | ACAUUGACCAAGAACUGCAUGGA | 1524 | | JUN:2278L21 antisense siNA | cAuGcAGuucuuGGucAAuTsT | 2022 |
| | | | | (2260C) stab05 | | |
| 2259 | CAUUGACCAAGAACUGCAUGGAC | 1525 | | JUN:2279L21 antisense siNA | ccAuGcAGuucuuGGucAATsT | 2023 |
| | | | | (2261C) stab05 | | |
| 2260 | AUUGACCAAGAACUGCAUGGACC | 1526 | | JUN:2280L21 antisense siNA | uccAuGcAGuucuuGGucATsT | 2024 |
| | | | | (2262C) stab05 | | |
| 2262 | UGACCAAGAACUGCAUGGACCUA | 1527 | | JUN:2282L21 antisense siNA | GGuccAuGcAGuucuuGGuTsT | 2025 |
| | | | | (2264C) stab05 | | |
| 2264 | ACCAAGAACUGCAUGGACCUAAC | 1528 | | JUN:2284L21 antisense siNA | uAGGuccAuGcAGuucuuGTsT | 2026 |
| | | | | (2266C) stab05 | | |
| 2266 | CAAGAACUGCAUGGACCUAACAU | 1529 | | JUN:2286L21 antisense siNA | GuuAGGuccAuGcAGuucuTsT | 2027 |
| | | | | (2268C) stab05 | | |
| 2268 | AGAACUGCAUGGACCUAACAUUC | 1530 | | JUN:2288L21 antisense siNA | AuGuuAGGuccAuGcAGuuTsT | 2028 |
| | | | | (2270C) stab05 | | |
| 2269 | GAACUGCAUGGACCUAACAUUCG | 1531 | 32016 | JUN:2289L21 antisense siNA | AAuGuuAGGuccAuGcAGuTsT | 2029 |
| | | | | (2271C) stab05 | | |
| 2270 | AACUGCAUGGACCUAACAUUCGA | 1532 | | JUN:2290L21 antisense siNA | GAAuGuuAGGuccAuGcAGTsT | 2030 |
| | | | | (2272C) stab05 | | |
| 2272 | CUGCAUGGACCUAACAUUCGAUC | 1533 | 32017 | JUN:2292L21 antisense siNA | ucGAAuGuuAGGuccAuGcTsT | 2031 |
| | | | | (2274C) stab05 | | |
| 2274 | GCAUGGACCUAACAUUCGAUCUC | 1534 | | JUN:2294L21 antisense siNA | GAucGAAuGuuAGGuccAuTsT | 2032 |
| | | | | (2276C) stab05 | | |
| 703 | AGUGACCGCGACUUUUCAAAGCC | 1507 | 32085 | JUN:705U21 sense siNA stab07 | B uGAccGcGAcuuuucAAAGTT B | 2033 |
| 1486 | CAAACCUCAGCAACUUCAACCCA | 1508 | 32086 | JUN:1488U21 sense siNA stab07 | B AAccucAGcAAcuucAAccTT B | 2034 |
| 1487 | AAACCUCAGCAACUUCAACCCAG | 1509 | 32087 | JUN:1489U21 sense siNA stab07 | B AccucAGcAAcuucAAcccTT B | 2035 |
| 1816 | AGGAAAAAGUGAAAACCUUGAAA | 1510 | 32088 | JUN:1818U21 sense siNA stab07 | B GAAAAAGuGAAAAccuuGATT B | 2036 |
| 1817 | GGAAAAAGUGAAAACCUUGAAAG | 1511 | 31818 | JUN:1819U21 sense siNA stab07 | B AAAAAGuGAAAAccuuGAATT B | 2037 |
| 1875 | CUCAGGGAACAGGUGGCACAGCU | 1512 | 32089 | JUN:1877U21 sense siNA stab07 | B cAGGGAAcAGGuGGcAcAGTT B | 2038 |
| 1901 | ACAGAAAGUCAUGAACCACGUUA | 1513 | 32090 | JUN:1903U21 sense siNA stab07 | B AGAAAGucAuGAAccAcGuTT B | 2039 |
| 1902 | CAGAAAGUCAUGAACCACGUUAA | 1514 | 32091 | JUN:1904U21 sense siNA stab07 | B GAAAGucAuGAAccAcGuuTT B | 2040 |
| 1904 | GAAAGUCAUGAACCACGUUAACA | 1515 | 32092 | JUN:1906U21 sense siNA stab07 | B AAGucAuGAAccAcGuuAATT B | 2041 |
| 1907 | AGUCAUGAACCACGUUAACAGUG | 1516 | 32093 | JUN:1909U21 sense siNA stab07 | B ucAuGAAccAcGuuAAcAGTT B | 2042 |
| 1924 | ACAGUGGGUGCCAACUCAUGCUA | 1517 | 32094 | JUN:1926U21 sense siNA stab07 | B AGuGGGuGccAAcucAuGcTT B | 2043 |
| 1930 | GGUGCCAACUCAUGCUAACGCAG | 1518 | 32095 | JUN:1932U21 sense siNA stab07 | B uGccAAcucAuGcuAAcGcTT B | 2044 |
| 1931 | GUGCCAACUCAUGCUAACGCAGC | 1519 | 32096 | JUN:1933U21 sense siNA stab07 | B GccAAcucAuGcuAAcGcATT B | 2045 |
| 1933 | GCCAACUCAUGCUAACGCAGCAG | 1520 | 32097 | JUN:1935U21 sense siNA stab07 | B cAAcucAuGcuAAcGcAGcTT B | 2046 |
| 1934 | CCAACUCAUGCUAACGCAGCAGU | 1521 | 32098 | JUN:1936U21 sense siNA stab07 | B AAcucAuGcuAAcGcAGcATT B | 2047 |
| 1935 | CAACUCAUGCUAACGCAGCAGUU | 1522 | 31819 | JUN:1937U21 sense siNA stab07 | B AcucAuGcuAAcGcAGcAGTT B | 2048 |
| 2257 | AACAUUGACCAAGAACUGCAUGG | 1523 | 32099 | JUN:2259U21 sense siNA stab07 | B cAuuGAccAAGAAcuGcAuTT B | 2049 |
| 2258 | ACAUUGACCAAGAACUGCAUGGA | 1524 | 32100 | JUN:2260U21 sense siNA stab07 | B AuuGAccAAGAAcuGcAuGTT B | 2050 |
| 2259 | CAUUGACCAAGAACUGCAUGGAC | 1525 | 31820 | JUN:2261U21 sense siNA stab07 | B uuGAccAAGAAcuGcAuGGTT B | 2051 |
| 2260 | AUUGACCAAGAACUGCAUGGACC | 1526 | 32101 | JUN:2262U21 sense siNA stab07 | B uGAccAAGAAcuGcAuGGATT B | 2052 |
| 2262 | UGACCAAGAACUGCAUGGACCUA | 1527 | 32102 | JUN:2264U21 sense siNA stab07 | B AccAAGAAcuGcAuGGAccTT B | 2053 |
| 2264 | ACCAAGAACUGCAUGGACCUAAC | 1528 | 31821 | JUN:2266U21 sense siNA stab07 | B cAAGAAcuGcAuGGAccuATT B | 2054 |
| 2266 | CAAGAACUGCAUGGACCUAACAU | 1529 | 32103 | JUN:2268U21 sense siNA stab07 | B AGAAcuGcAuGGAccuAAcTT B | 2055 |
| 2268 | AGAACUGCAUGGACCUAACAUUC | 1530 | 32104 | JUN:2270U21 sense siNA stab07 | B AAcuGcAuGGAccuAAcAuTT B | 2056 |
| 2269 | GAACUGCAUGGACCUAACAUUCG | 1531 | 31822 | JUN:2271U21 sense siNA stab07 | B AcuGcAuGGAccuAAcAuuTT B | 2057 |
| 2270 | AACUGCAUGGACCUAACAUUCGA | 1532 | 31823 | JUN:2272U21 sense siNA stab07 | B cuGcAuGGAccuAAcAuucTT B | 2058 |
| 2272 | CUGCAUGGACCUAACAUUCGAUC | 1533 | 31824 | JUN:2274U21 sense siNA stab07 | B GcAuGGAccuAAcAuucGATT B | 2059 |
| 2274 | GCAUGGACCUAACAUUCGAUCUC | 1534 | 31825 | JUN:2276U21 sense siNA stab07 | B AuGGAccuAAcAuucGAucTT B | 2060 |
| 703 | AGUGACCGCGACUUUUCAAAGCC | 1507 | | JUN:723L21 antisense siNA | cuuuGAAAAGucGcGGucATsT | 2061 |
| | | | | (705C) stab11 | | |
| 1486 | CAAACCUCAGCAACUUCAACCCA | 1508 | | JUN:1506L21 antisense siNA | GGuuGAAGuuGcuGAGGuuTsT | 2062 |
| | | | | (1488C) stab11 | | |
| 1487 | AAACCUCAGCAACUUCAACCCAG | 1509 | | JUN:1507L21 antisense siNA | GGGuuGAAGuuGcuGAGGuTsT | 2063 |
| | | | | (1489C) stab11 | | |
| 1816 | AGGAAAAAGUGAAAACCUUGAAA | 1510 | | JUN:1836L21 antisense siNA | ucAAGGuuuuuAcuuuuucTsT | 2064 |
| | | | | (1818C) stab11 | | |
| 1817 | GGAAAAAGUGAAAACCUUGAAAG | 1511 | | JUN:1837L21 antisense siNA | uucAAGGuuuucAcuuuuuTsT | 2065 |
| | | | | (1819C) stab11 | | |
| 1875 | CUCAGGGAACAGGUGGCACAGGU | 1512 | | JUN:1895L21 antisense siNA | cuGuGccAccuGuucccuGTsT | 2066 |
| | | | | (1877C) stab11 | | |
| 1901 | ACAGAAAGUCAUGAACCACGUUA | 1513 | | JUN:1921L21 antisense siNA | AcGuGGuucAuGAcuuucuTsT | 2067 |
| | | | | (1903C) stab11 | | |
| 1902 | CAGAAAGUCAUGAACCACGUUAA | 1514 | | JUN:1922L21 antisense siNA | AAcGuGGuucAuGAcuuucTsT | 2068 |
| | | | | (1904C) stab11 | | |
| 1904 | GAAAGUCAUGAACCACGUUAACA | 1515 | | JUN:1924L21 antisense siNA | uuAAcGuGGuucAuGAcuuTsT | 2069 |
| | | | | (1906C) stab11 | | |
| 1907 | AGUCAUGAACCACGUUAACAGUG | 1516 | | JUN:1927L21 antisense siNA | cuGuuAAcGuGGuucAuGATsT | 2070 |
| | | | | (1909C) stab11 | | |
| 1924 | ACAGUGGGUGCCAACUCAUGCUA | 1517 | | JUN:1944L21 antisense siNA | GcAuGAGuuGGcAcccAcuTsT | 2071 |
| | | | | (1926C) stab11 | | |
| 1930 | GGUGCCAACUCAUGCUAACGCAG | 1518 | | JUN:1950L21 antisense siNA | GcGuuAGcAuGAGuuGGcATsT | 2072 |
| | | | | (1932C) stab11 | | |
| 1931 | GUGCCAACUCAUGCUAACGCAGC | 1519 | | JUN:1951L21 antisense siNA | uGcGuuAGcAuGAGuuGGcTsT | 2073 |
| | | | | (1933C) stab11 | | |
| 1933 | GCCAACUCAUGCUAACGCAGCAG | 1520 | | JUN:1953L21 antisense siNA | GcuGcGuuAGcAuGAGuuGTsT | 2074 |
| | | | | (1935C) stab11 | | |
| 1934 | CCAACUCAUGCUAACGCAGCAGU | 1521 | | JUN:1954L21 antisense siNA | uGcuGcGuuAGcAuGAGuuTsT | 2075 |
| | | | | (1936C) stab11 | | |
| 1935 | CAACUCAUGCUAACGCAGCAGUU | 1522 | | JUN:1955L21 antisense siNA | cuGcuGcGuuAGcAuGAGuTsT | 2076 |
| | | | | (1937C) stab11 | | |
| 2257 | AACAUUGACCAAGAACUGCAUGG | 1523 | | JUN:2277L21 antisense siNA | AuGcAGuucuuGGucAAuGTsT | 2077 |
| | | | | (2259C) stab11 | | |
| 2258 | ACAUUGACCAAGAACUGCAUGGA | 1524 | | JUN:2278L21 antisense siNA | cAuGcAGuucuuGGucAAuTsT | 2078 |
| | | | | (2260C) stab11 | | |
| 2259 | CAUUGACCAAGAACUGCAUGGAC | 1525 | | JUN:2279L21 antisense siNA | ccAuGcAGuucuuGGucAATsT | 2079 |
| | | | | (2261C) stab11 | | |
| 2260 | AUUGACCAAGAACUGCAUGGACC | 1526 | | JUN:2280L21 antisense siNA | uccAuGcAGuucuuGGucATsT | 2080 |
| | | | | (2262C) stab11 | | |
| 2262 | UGACCAAGAACUGCAUGGACCUA | 1527 | | JUN:2282L21 antisense siNA | GGuccAuGcAGuucuuGGuTsT | 2081 |
| | | | | (2264C) stab11 | | |
| 2264 | ACCAAGAACUGCAUGGACCUAAC | 1528 | | JUN:2284L21 antisense siNA | uAGGuccAuGcAGuucuuGTsT | 2082 |
| | | | | (2266C) stab11 | | |
| 2266 | CAAGAACUGCAUGGACCUAACAU | 1529 | | JUN:2286L21 antisense siNA | GuuAGGuccAuGcAGuucuTsT | 2083 |
| | | | | (2268C) stab11 | | |
| 2268 | AGAACUGCAUGGACCUAACAUUC | 1530 | | JUN:2288L21 antisense siNA | AuGuuAGGuccAuGcAGuuTsT | 2084 |
| | | | | (2270C) stab11 | | |
| 2269 | GAACUGCAUGGACCUAACAUUCG | 1531 | | JUN:2289L21 antisense siNA | AAuGuuAGGuccAuGcAGuTsT | 2085 |
| | | | | (2271C) stab11 | | |
| 2270 | AACUGCAUGGACCUAACAUUCGA | 1532 | | JUN:2290L21 antisense siNA | GAAuGuuAGGuccAuGcAGTsT | 2086 |
| | | | | (2272C) stab11 | | |
| 2272 | CUGCAUGGACCUAACAUUCGAUC | 1533 | | JUN:2292L21 antisense siNA | ucGAAuGuuAGGuccAuGcTsT | 2087 |
| | | | | (2274C) stab11 | | |
| 2274 | GCAUGGACCUAACAUUCGAUCUC | 1534 | | JUN:2294L21 antisense siNA | GAucGAAuGuuAGGuccAuTsT | 2088 |
| | | | | (2276C) stab11 | | |
| 703 | AGUGACCGCGACUUUUCAAAGCC | 1507 | | JUN:705U21 sense siNA stab18 | B uGAccGcGAcuuuucAAAGTT B | 2089 |
| 1486 | CAAACCUCAGCAACUUCAACCCA | 1508 | | JUN:1488U21 sense siNA stab18 | B AAccucAGcAAcuucAAccTT B | 2090 |
| 1487 | AAACCUCAGCAACUUCAACCCAG | 1509 | | JUN:1489U21 sense siNA stab18 | B AccucAGcAAcuucAAcccTT B | 2091 |
| 1816 | AGGAAAAAGUGAAAACCUUGAAA | 1510 | | JUN:1818U21 sense siNA stab18 | B GAAAAAGuGAAAAccuuGATT B | 2092 |
| 1817 | GGAAAAAGUGAAAACCUUGAAAG | 1511 | | JUN:1819U21 sense siNA stab18 | B AAAAAGuGAAAAccuuGAATT B | 2093 |
| 1875 | CUCAGGGAACAGGUGGCACAGCU | 1512 | | JUN:1877U21 sense siNA stab18 | B cAGGGAAcAGGuGGcAcAGTT B | 2094 |
| 1901 | ACAGAAAGUCAUGAACCACGUUA | 1513 | | JUN:1903U21 sense siNA stab18 | B AGAAAGucAuGAAccAcGuTT B | 2095 |
| 1902 | CAGAAAGUCAUGAACCACGUUAA | 1514 | | JUN:1904U21 sense siNA stab18 | B GAAAGucAuGAAccAcGuuTT B | 2096 |
| 1904 | GAAAGUCAUGAACCACGUUAACA | 1515 | | JUN:1906U21 sense siNA stab18 | B AAGucAuGAAccAcGuuAATT B | 2097 |
| 1907 | AGUCAUGAACCACGUUAACAGUG | 1516 | | JUN:1909U21 sense siNA stab18 | B ucAuGAAccAcGuuAAcAGTT B | 2098 |
| 1924 | ACAGUGGGUGCCAACUCAUGCUA | 1517 | | JUN:1926U21 sense siNA stab18 | B AGuGGGuGccAAcucAuGcTT B | 2099 |
| 1930 | GGUGCCAACUCAUGCUAACGCAG | 1518 | | JUN:1932U21 sense siNA stab18 | B uGccAAcucAuGcuAAcGcTT B | 2100 |
| 1931 | GUGCCAACUCAUGCUAACGCAGC | 1519 | | JUN:1933U21 sense siNA stab18 | B GccAAcucAuGcuAAcGcATT B | 2101 |
| 1933 | GCCAACUCAUGCUAACGCAGCAG | 1520 | | JUN:1935U21 sense siNA stab18 | B cAAcucAuGcuAAcGcAGcTT B | 2102 |
| 1934 | CCAACUCAUGCUAACGCAGCAGU | 1521 | | JUN:1936U21 sense siNA stab18 | B AAcucAuGcuAAcGcAGcATT B | 2103 |
| 1935 | CAACUCAUGCUAACGCAGCAGUU | 1522 | | JUN:1937U21 sense siNA stab18 | B AcucAuGcuAAcGcAGcAGTT B | 2104 |
| 2257 | AACAUUGACCAAGAACUGCAUGG | 1523 | | JUN:2259U21 sense siNA stab18 | B cAuuGAccAAGAAcuGcAuTT B | 2105 |
| 2258 | ACAUUGACCAAGAACUGCAUGGA | 1524 | | JUN:2260U21 sense siNA stab18 | B AuuGAccAAGAAcuGcAuGTT B | 2106 |
| 2259 | CAUUGACCAAGAACUGCAUGGAC | 1525 | | JUN:2261U21 sense siNA stab18 | B uuGAccAAGAAcuGcAuGGTT B | 2107 |
| 2260 | AUUGACCAAGAACUGCAUGGACC | 1526 | | JUN:2262U21 sense siNA stab18 | B uGAccAAGAAcuGcAuGGATT B | 2108 |
| 2262 | UGACCAAGAACUGCAUGGACCUA | 1527 | | JUN:2264U21 sense siNA stab18 | B AccAAGAAcuGcAuGGAccTT B | 2109 |
| 2264 | ACCAAGAACUGCAUGGACCUAAC | 1528 | | JUN:2266U21 sense siNA stab18 | B cAAGAAcuGcAuGGAccuATT B | 2110 |
| 2266 | CAAGAACUGCAUGGACCUAACAU | 1529 | | JUN:2268U21 sense siNA stab18 | B AGAAcuGcAuGGAccuAAcTT B | 2111 |
| 2268 | AGAACUGCAUGGACCUAACAUUC | 1530 | | JUN:2270U21 sense siNA stab18 | B AAcuGcAuGGAccuAAcAuTT B | 2112 |
| 2269 | GAACUGCAUGGACCUAACAUUCG | 1531 | 32081 | JUN:2271U21 sense siNA stab18 | B AcuGcAuGGAccuAAcAuuTT B | 2113 |
| 2270 | AACUGCAUGGACCUAACAUUCGA | 1532 | | JUN:2272U21 sense siNA stab18 | B cuGcAuGGAccuAAcAuucTT B | 2114 |
| 2272 | CUGCAUGGACCUAACAUUCGAUC | 1533 | 32082 | JUN:2274U21 sense siNA stab18 | B GcAuGGAccuAAcAuucGATT B | 2115 |
| 2274 | GCAUGGACCUAACAUUCGAUCUC | 1534 | | JUN:2276U21 sense siNA stab18 | B AuGGAccuAAcAuucGAucTT B | 2116 |
| 703 | AGUGACCGCGACUUUUCAAAGCC | 1507 | 32105 | JUN:723L21 antisense siNA | cuuuGAAAAGucGcGGucATsT | 2117 |
| | | | | (705C) stab08 | | |
| 1486 | CAAACCUCAGCAACUUCAACCCA | 1508 | 32106 | JUN:1506L21 antisense siNA | GGuuGAAGuuGcuGAGGuuTsT | 2118 |
| | | | | (1488C) stab08 | | |
| 1487 | AAACCUCAGCAACUUCAACCCAG | 1509 | 32107 | JUN:1507L21 antisense siNA | GGGuuGAAGuuGcuGAGGuTsT | 2119 |
| | | | | (1489C) stab08 | | |
| 1816 | AGGAAAAAGUGAAAACCUUGAAA | 1510 | 32108 | JUN:1836L21 antisense siNA | ucAAGGuuuucAcuuuuucTsT | 2120 |
| | | | | (1818C) stab08 | | |
| 1817 | GGAAAAAGUGAAAACCUUGAAAG | 1511 | 31826 | JUN:1837L21 antisense siNA | uucAAGGuuuucAcuuuuuTsT | 2121 |
| | | | | (1819C) stab08 | | |
| 1875 | CUCAGGGAACAGGUGGCACAGCU | 1512 | 32109 | JUN:1895L21 antisense siNA | cuGuGccAccuGuucccuGTsT | 2122 |
| | | | | (1877C) stab08 | | |
| 1901 | ACAGAAAGUCAUGAACCACGUUA | 1513 | 32110 | JUN:1921L21 antisense siNA | AcGuGGuucAuGAcuuucuTsT | 2123 |
| | | | | (1903C) stab08 | | |
| 1902 | CAGAAAGUCAUGAACCACGUUAA | 1514 | 32111 | JUN:1922L21 antisense siNA | AAcGuGGuucAuGAcuuucTsT | 2124 |
| | | | | (1904C) stab08 | | |
| 1904 | GAAAGUCAUGAACCACGUUAACA | 1515 | 32112 | JUN:1924L21 antisense siNA | uuAAcGuGGuucAuGAcuuTsT | 2125 |
| | | | | (1906C) stab08 | | |
| 1907 | AGUCAUGAACCACGUUAACAGUG | 1516 | 32113 | JUN:1927L21 antisense siNA | cuGuuAAcGuGGuucAuGATsT | 2126 |
| | | | | (1909C) stab08 | | |
| 1924 | ACAGUGGGUGCCAACUCAUGCUA | 1517 | 32114 | JUN:1944L21 antisense siNA | GcAuGAGuuGGcAcccAcuTsT | 2127 |
| | | | | (1926C) stab08 | | |
| 1930 | GGUGCCAACUCAUGCUAACGCAG | 1518 | 32115 | JUN:1950L21 antisense siNA | GcGuuAGcAuGAGuuGGcATsT | 2128 |
| | | | | (1932C) stab08 | | |
| 1931 | GUGCCAACUCAUGCUAACGCAGC | 1519 | 32116 | JUN:1951L21 antisense siNA | uGcGuuAGcAuGAGuuGGcTsT | 2129 |
| | | | | (1933C) stab08 | | |
| 1933 | GCCAACUCAUGCUAACGCAGCAG | 1520 | 32117 | JUN:1953L21 antisense siNA | GcuGcGuuAGcAuGAGuuGTsT | 2130 |
| | | | | (1935C) stab08 | | |
| 1934 | CCAACUCAUGCUAACGCAGCAGU | 1521 | 32118 | JUN:1954L21 antisense siNA | uGcuGcGuuAGcAuGAGuuTsT | 2131 |
| | | | | (1936C) stab08 | | |
| 1935 | CAACUCAUGCUAACGCAGCAGUU | 1522 | 31827 | JUN:1955L21 antisense siNA | cuGcuGcGuuAGcAuGAGuTsT | 2132 |
| | | | | (1937C) stab08 | | |
| 2257 | AACAUUGACCAAGAACUGCAUGG | 1523 | 32119 | JUN:2277L21 antisense siNA | AuGcAGuucuuGGucAAuGTsT | 2133 |
| | | | | (2259C) stab08 | | |
| 2258 | ACAUUGACCAAGAACUGCAUGGA | 1524 | 32120 | JUN:2278L21 antisense siNA | cAuGcAGuucuuGGucAAuTsT | 2134 |
| | | | | (2260C) stab08 | | |
| 2259 | CAUUGACCAAGAACUGCAUGGAC | 1525 | 31828 | JUN:2279L21 antisense siNA | ccAuGcAGuucuuGGucAATsT | 2135 |
| | | | | (2261C) stab08 | | |
| 2260 | AUUGACCAAGAACUGCAUGGACC | 1526 | 32121 | JUN:2280L21 antisense siNA | uccAuGcAGuucuuGGucATsT | 2136 |
| | | | | (2262C) stab08 | | |
| 2262 | UGACCAAGAACUGCAUGGACCUA | 1527 | 32122 | JUN:2282L21 antisense siNA | GGuccAuGcAGuucuuGGuTsT | 2137 |
| | | | | (2264C) stab08 | | |
| 2264 | ACCAAGAACUGCAUGGACCUAAC | 1528 | 31829 | JUN:2284L21 antisense siNA | uAGGuccAuGcAGuucuuGTsT | 2138 |
| | | | | (2266C) stab08 | | |
| 2266 | CAAGAACUGCAUGGACCUAACAU | 1529 | 32123 | JUN:2286L21 antisense siNA | GuuAGGuccAuGcAGuucuTsT | 2139 |
| | | | | (2268C) stab08 | | |
| 2268 | AGAACUGCAUGGACCUAACAUUC | 1530 | 32124 | JUN:2288L21 antisense siNA | AuGuuAGGuccAuGcAGuuTsT | 2140 |
| | | | | (2270C) stab08 | | |
| 2269 | GAACUGCAUGGACCUAACAUUCG | 1531 | 31830 | JUN:2289L21 antisense siNA | AAuGuuAGGuccAuGcAGuTsT | 2141 |
| | | | | (2271C) stab08 | | |
| 2270 | AACUGCAUGGACCUAACAUUCGA | 1532 | 31831 | JUN:2290L21 antisense siNA | GAAuGuuAGGuccAuGcAGTsT | 2142 |
| | | | | (2272C) stab08 | | |
| 2272 | CUGCAUGGACCUAACAUUCGAUC | 1533 | 31832 | JUN:2292L21 antisense siNA | ucGAAuGuuAGGuccAuGcTsT | 2143 |
| | | | | (2274C) stab08 | | |
| 2274 | GCAUGGACCUAACAUUCGAUCUC | 1534 | 31833 | JUN:2294L21 antisense siNA | GAucGAAuGuuAGGuccAuTsT | 2144 |
| | | | | (2276C) stab08 | | |
| 703 | AGUGACCGCGACUUUUCAAAGCC | 1507 | | JUN:705U21 sense siNA stab09 | B UGACCGCGACUUUUCAAAGTT B | 2145 |
| 1486 | CAAACCUCAGCAACUUCAACCCA | 1508 | | JUN:1488U21 sense siNA stab09 | B AACCUCAGCAACUUCAACCTT B | 2146 |
| 1487 | AAACCUCAGCAACUUCAACCCAG | 1509 | | JUN:1489U21 sense siNA stab09 | B ACCUCAGCAACUUCAACCCTT B | 2147 |
| 1816 | AGGAAAAAGUGAAAACCUUGAAA | 1510 | | JUN:1818U21 sense siNA stab09 | B GAAAAAGUGAAAACCUUGATT B | 2148 |
| 1817 | GGAAAAAGUGAAAACCUUGAAAG | 1511 | | JUN:1819U21 sense siNA stab09 | B AAAAAGUGAAAACCUUGAATT B | 2149 |
| 1875 | CUCAGGGAACAGGUGGCACAGCU | 1512 | | JUN:1877U21 sense siNA stab09 | B CAGGGAACAGGUGGCACAGTT B | 2150 |
| 1901 | ACAGAAAGUCAUGAACCACGUUA | 1513 | 32330 | JUN:1903U21 sense siNA stab09 | B AGAAAGUCAUGAACCACGUTT B | 2151 |
| 1902 | CAGAAAGUCAUGAACCACGUUAA | 1514 | | JUN:1904U21 sense siNA stab09 | B GAAAGUCAUGAACCACGUUTT B | 2152 |
| 1904 | GAAAGUCAUGAACCACGUUAACA | 1515 | 32331 | JUN:1906U21 sense siNA stab09 | B AAGUCAUGAACCACGUUAATT B | 2153 |
| 1907 | AGUCAUGAACCACGUUAACAGUG | 1516 | | JUN:1909U21 sense siNA stab09 | B UCAUGAACCACGUUAACAGTT B | 2154 |
| 1924 | ACAGUGGGUGCCAACUCAUGCUA | 1517 | | JUN:1926U21 sense siNA stab09 | B AGUGGGUGCCAACUCAUGCTT B | 2155 |
| 1930 | GGUGCCAACUCAUGCUAACGCAG | 1518 | | JUN:1932U21 sense siNA stab09 | B UGCCAACUCAUGCUAACGCTT B | 2156 |
| 1931 | GUGCCAACUCAUGCUAACGCAGC | 1519 | | JUN:1933U21 sense siNA stab09 | B GCCAACUCAUGCUAACGCATT B | 2157 |
| 1933 | GCCAACUCAUGCUAACGCAGCAG | 1520 | | JUN:1935U21 sense siNA stab09 | B CAACUCAUGCUAACGCAGCTT B | 2158 |
| 1934 | CCAACUCAUGCUAACGCAGCAGU | 1521 | | JUN:1936U21 sense siNA stab09 | B AACUCAUGCUAACGCAGCATT B | 2159 |
| 1935 | CAACUCAUGCUAACGCAGCAGUU | 1522 | | JUN:1937U21 sense siNA stab09 | B ACUCAUGCUAACGCAGCAGTT B | 2160 |
| 2257 | AACAUUGACCAAGAACUGCAUGG | 1523 | | JUN:2259U21 sense siNA stab09 | B CAUUGACCAAGAACUGCAUTT B | 2161 |
| 2258 | ACAUUGACCAAGAACUGCAUGGA | 1524 | | JUN:2260U21 sense siNA stab09 | B AUUGACCAAGAACUGCAUGTT B | 2162 |
| 2259 | CAUUGACCAAGAACUGCAUGGAC | 1525 | | JUN:2261U21 sense siNA stab09 | B UUGACCAAGAACUGCAUGGTT B | 2163 |
| 2260 | AUUGACCAAGAACUGCAUGGACC | 1526 | | JUN:2262U21 sense siNA stab09 | B UGACCAAGAACUGCAUGGATT B | 2164 |
| 2262 | UGACCAAGAACUGCAUGGACCUA | 1527 | | JUN:2264U21 sense siNA stab09 | B ACCAAGAACUGCAUGGACCTT B | 2165 |
| 2264 | ACCAAGAACUGCAUGGACCUAAC | 1528 | | JUN:2266U21 sense siNA stab09 | B CAAGAACUGCAUGGACCUATT B | 2166 |
| 2266 | CAAGAACUGCAUGGACCUAACAU | 1529 | | JUN:2268U21 sense siNA stab09 | B AGAACUGCAUGGACCUAACTT B | 2167 |
| 2268 | AGAACUGCAUGGACCUAACAUUC | 1530 | | JUN:2270U21 sense siNA stab09 | B AACUGCAUGGACCUAACAUTT B | 2168 |
| 2269 | GAACUGCAUGGACCUAACAUUCG | 1531 | 32020 | JUN:2271U21 sense siNA stab09 | B ACUGCAUGGACCUAACAUUTT B | 2169 |
| 2270 | AACUGCAUGGACCUAACAUUCGA | 1532 | | JUN:2272U21 sense siNA stab09 | B CUGCAUGGACCUAACAUUCTT B | 2170 |
| 2272 | CUGCAUGGACCUAACAUUCGAUC | 1533 | 32021 | JUN:2274U21 sense siNA stab09 | B GCAUGGACCUAACAUUCGATT B | 2171 |
| 2274 | GCAUGGACCUAACAUUCGAUCUC | 1534 | | JUN:2276U21 sense siNA stab09 | B AUGGACCUAACAUUCGAUCTT B | 2172 |
| 703 | AGUGACCGCGACUUUUCAAAGCC | 1507 | | JUN:723L21 antisense siNA | CUUUGAAAAGUCGCGGUCATsT | 2173 |
| | | | | (705C) stab10 | | |
| 1486 | CAAACCUCAGCAACUUCAACCCA | 1508 | | JUN:1506L21 antisense siNA | GGUUGAAGUUGCUGAGGUUTsT | 2174 |
| | | | | (1488C) stab10 | | |
| 1487 | AAACCUCAGCAACUUCAACCCAG | 1509 | | JUN:1507L21 antisense siNA | GGGUUGAAGUUGCUGAGGUTsT | 2175 |
| | | | | (1489C) stab10 | | |
| 1816 | AGGAAAAAGUGAAAACCUUGAAA | 1510 | | JUN:1836L21 antisense siNA | UCAAGGUUUUCACUUUUUCTsT | 2176 |
| | | | | (1818C) stab10 | | |
| 1817 | GGAAAAAGUGAAAACCUUGAAAG | 1511 | | JUN:1837L21 antisense siNA | UUCAAGGUUUUCACUUUUUTsT | 2177 |
| | | | | (1819C) stab10 | | |
| 1875 | CUCAGGGAACAGGUGGCACAGCU | 1512 | | JUN:1895L21 antisense siNA | CUGUGCCACCUGUUCCCUGTsT | 2178 |
| | | | | (1877C) stab10 | | |
| 1901 | ACAGAAAGUCAUGAACCACGUUA | 1513 | 32332 | JUN:1921L21 antisense siNA | ACGUGGUUCAUGACUUUCUTsT | 2179 |
| | | | | (1903C) stab10 | | |
| 1902 | CAGAAAGUCAUGAACCACGUUAA | 1514 | | JUN:1922L21 antisense siNA | AACGUGGUUCAUGACUUUCTsT | 2180 |
| | | | | (1904C) stab10 | | |
| 1904 | GAAAGUCAUGAACCACGUUAACA | 1515 | 32333 | JUN:1924L21 antisense siNA | UUAACGUGGUUCAUGACUUTsT | 2181 |
| | | | | (1906C) stab10 | | |
| 1907 | AGUCAUGAACCACGUUAACAGUG | 1516 | | JUN:1927L21 antisense siNA | CUGUUAACGUGGUUCAUGATsT | 2182 |
| | | | | (1909C) stab10 | | |
| 1924 | ACAGUGGGUGCCAACUCAUGCUA | 1517 | | JUN:1944L21 antisense siNA | GCAUGAGUUGGCACCCACUTsT | 2183 |
| | | | | (1926C) stab10 | | |
| 1930 | GGUGCCAACUCAUGCUAACGCAG | 1518 | | JUN:1950L21 antisense siNA | GCGUUAGCAUGAGUUGGCATsT | 2184 |
| | | | | (1932C) stab10 | | |
| 1931 | GUGCCAACUCAUGCUAACGCAGC | 1519 | | JUN:1951L21 antisense siNA | UGCGUUAGCAUGAGUUGGCTsT | 2185 |
| | | | | (1933C) stab10 | | |
| 1933 | GCCAACUCAUGCUAACGCAGCAG | 1520 | | JUN:1953L21 antisense siNA | GCUGCGUUAGCAUGAGUUGTsT | 2186 |
| | | | | (1935C) stab10 | | |
| 1934 | CCAACUCAUGCUAACGCAGCAGU | 1521 | | JUN:1954L21 antisense siNA | UGCUGCGUUAGCAUGAGUUTsT | 2187 |
| | | | | (1936C) stab10 | | |
| 1935 | CAACUCAUGCUAACGCAGCAGUU | 1522 | | JUN:1955L21 antisense siNA | CUGCUGCGUUAGCAUGAGUTsT | 2188 |
| | | | | (1937C) stab10 | | |
| 2257 | AACAUUGACCAAGAACUGCAUGG | 1523 | | JUN:2277L21 antisense siNA | AUGCAGUUCUUGGUCAAUGTsT | 2189 |
| | | | | (2259C) stab10 | | |
| 2258 | ACAUUGACCAAGAACUGCAUGGA | 1524 | | JUN:2278L21 antisense siNA | CAUGCAGUUCUUGGUCAAUTsT | 2190 |
| | | | | (2260C) stab10 | | |
| 2259 | CAUUGACCAAGAACUGCAUGGAC | 1525 | | JUN:2279L21 antisense siNA | CCAUGCAGUUCUUGGUCAATsT | 2191 |
| | | | | (2261C) stab10 | | |
| 2260 | AUUGACCAAGAACUGCAUGGACC | 1526 | | JUN:2280L21 antisense siNA | UCCAUGCAGUUCUUGGUCATsT | 2192 |
| | | | | (2262C) stab10 | | |
| 2262 | UGACCAAGAACUGCAUGGACCUA | 1527 | | JUN:2282L21 antisense siNA | GGUCCAUGCAGUUCUUGGUTsT | 2193 |
| | | | | (2264C) stab10 | | |
| 2264 | ACCAAGAACUGCAUGGACCUAAC | 1528 | | JUN:2284L21 antisense siNA | UAGGUCCAUGCAGUUCUUGTsT | 2194 |
| | | | | (2266C) stab10 | | |
| 2266 | CAAGAACUGCAUGGACCUAACAU | 1529 | | JUN:2286L21 antisense siNA | GUUAGGUCCAUGCAGUUCUTsT | 2195 |
| | | | | (2268C) stab10 | | |
| 2268 | AGAACUGCAUGGACCUAACAUUC | 1530 | | JUN:2288L21 antisense siNA | AUGUUAGGUCCAUGCAGUUTsT | 2196 |
| | | | | (2270C) stab10 | | |
| 2269 | GAACUGCAUGGACCUAACAUUCG | 1531 | 32022 | JUN:2289L21 antisense siNA | AAUGUUAGGUCCAUGCAGUTsT | 2197 |
| | | | | (2271C) stab10 | | |
| 2270 | AACUGCAUGGACCUAACAUUCGA | 1532 | | JUN:2290L21 antisense siNA | GAAUGUUAGGUCCAUGCAGTsT | 2198 |
| | | | | (2272C) stab10 | | |
| 2272 | CUGCAUGGACCUAACAUUCGAUC | 1533 | 32023 | JUN:2292L21 antisense siNA | UCGAAUGUUAGGUCCAUGCTsT | 2199 |
| | | | | (2274C) stab10 | | |
| 2274 | GCAUGGACCUAACAUUCGAUCUC | 1534 | | JUN:2294L21 antisense siNA | GAUCGAAUGUUAGGUCCAUTsT | 2200 |
| | | | | (2276C) stab10 | | |
| 703 | AGUGACCGCGACUUUUCAAAGCC | 1507 | | JUN:723L21 antisense siNA | cuuuGAAAAGucGcGGucATT B | 2201 |
| | | | | (705C) stab19 | | |
| 1486 | CAAACCUCAGCAACUUCAACCCA | 1508 | | JUN:1506L21 antisense siNA | GGuuGAAGuuGcuGAGGuuTT B | 2202 |
| | | | | (1488C) stab19 | | |
| 1487 | AAACCUCAGCAACUUCAACCCAG | 1509 | | JUN:1507L21 antisense siNA | GGGuuGAAGuuGcuGAGGuTT B | 2203 |
| | | | | (1489C) stab19 | | |
| 1816 | AGGAAAAAGUGAAAACCUUGAAA | 1510 | | JUN:1836L21 antisense siNA | ucAAGGuuuucAcuuuuucTT B | 2204 |
| | | | | (1818C) stab19 | | |
| 1817 | GGAAAAAGUGAAAACCUUGAAAG | 1511 | | JUN:1837L21 antisense siNA | uucAAGGuuuucAcuuuuuTT B | 2205 |
| | | | | (1819C) stab19 | | |
| 1875 | CUCAGGGAACAGGUGGCACAGCU | 1512 | | JUN:1895L21 antisense siNA | cuGuGccAccuGuucccuGTT B | 2206 |
| | | | | (1877C) stab19 | | |
| 1901 | ACAGAAAGUCAUGAACCACGUUA | 1513 | | JUN:1921L21 antisense siNA | AcGuGGuucAuGAcuuucuTT B | 2207 |
| | | | | (1903C) stab19 | | |
| 1902 | CAGAAAGUCAUGAACCACGUUAA | 1514 | | JUN:1922L21 antisense siNA | AAcGuGGuucAuGAcuuucTT B | 2208 |
| | | | | (1904C) stab19 | | |
| 1904 | GAAAGUCAUGAACCACGUUAACA | 1515 | | JUN:1924L21 antisense siNA | uuAAcGuGGuucAuGAcuuTT B | 2209 |
| | | | | (1906C) stab19 | | |
| 1907 | AGUCAUGAACCACGUUAACAGUG | 1516 | | JUN:1927L21 antisense siNA | cuGuuAAcGuGGuucAuGATT B | 2210 |
| | | | | (1909C) stab19 | | |
| 1924 | ACAGUGGGUGCCAACUCAUGCUA | 1517 | | JUN:1944L21 antisense siNA | GcAuGAGuuGGcAcccAcuTT B | 2211 |
| | | | | (1926C) stab19 | | |
| 1930 | GGUGCCAACUCAUGCUAACGCAG | 1518 | | JUN:1950L21 antisense siNA | GcGuuAGcAuGAGuuGGcATT B | 2212 |
| | | | | (1932C) stab19 | | |
| 1931 | GUGCCAACUCAUGCUAACGCAGC | 1519 | | JUN:1951L21 antisense siNA | uGcGuuAGcAuGAGuuGGcTT B | 2213 |
| | | | | (1933C) stab19 | | |
| 1933 | GCCAACUCAUGCUAACGCAGCAG | 1520 | | JUN:1953L21 antisense siNA | GcuGcGuuAGcAuGAGuuGTT B | 2214 |
| | | | | (1935C) stab19 | | |
| 1934 | CCAACUCAUGCUAACGCAGCAGU | 1521 | | JUN:1954L21 antisense siNA | uGcuGcGuuAGcAuGAGuuTT B | 2215 |
| | | | | (1936C) stab19 | | |
| 1935 | CAACUCAUGCUAACGCAGCAGUU | 1522 | | JUN:1955L21 antisense siNA | cuGcuGcGuuAGcAuGAGuTT B | 2216 |
| | | | | (1937C) stab19 | | |
| 2257 | AACAUUGACCAAGAACUGCAUGG | 1523 | | JUN:2277L21 antisense siNA | AuGcAGuucuuGGucAAuGTT B | 2217 |
| | | | | (2259C) stab19 | | |
| 2258 | ACAUUGACCAAGAACUGCAUGGA | 1524 | | JUN:2278L21 antisense siNA | cAuGcAGuucuuGGucAAuTT B | 2218 |
| | | | | (2260C) stab19 | | |
| 2259 | CAUUGACCAAGAACUGCAUGGAC | 1525 | | JUN:2279L21 antisense siNA | ccAuGcAGuucuuGGucAATT B | 2219 |
| | | | | (2261C) stab19 | | |
| 2260 | AUUGACCAAGAACUGCAUGGACC | 1526 | | JUN:2280L21 antisense siNA | uccAuGcAGuucuuGGucATT B | 2220 |
| | | | | (2262C) stab19 | | |
| 2262 | UGACCAAGAACUGCAUGGACCUA | 1527 | | JUN:2282L21 antisense siNA | GGuccAuGcAGuucuuGGuTT B | 2221 |
| | | | | (2264C) stab19 | | |
| 2264 | ACCAAGAACUGCAUGGACCUAAC | 1528 | | JUN:2284L21 antisense siNA | uAGGuccAuGcAGuucuuGTT B | 2222 |
| | | | | (2266C) stab19 | | |
| 2266 | CAAGAACUGCAUGGACCUAACAU | 1529 | | JUN:2286L21 antisense siNA | GuuAGGuccAuGcAGuucuTT B | 2223 |
| | | | | (2268C) stab19 | | |
| 2268 | AGAACUGCAUGGACCUAACAUUC | 1530 | | JUN:2288L21 antisense siNA | AuGuuAGGuccAuGcAGuuTT B | 2224 |
| | | | | (2270C) stab19 | | |
| 2269 | GAACUGCAUGGACCUAACAUUCG | 1531 | | JUN:2289L21 antisense siNA | AAuGuuAGGuccAuGcAGuTT B | 2225 |
| | | | | (2271C) stab19 | | |
| 2270 | AACUGCAUGGACCUAACAUUCGA | 1532 | | JUN:2290L21 antisense siNA | GAAuGuuAGGuccAuGcAGTT B | 2226 |
| | | | | (2272C) stab19 | | |
| 2272 | CUGCAUGGACCUAACAUUCGAUC | 1533 | | JUN:2292L21 antisense siNA | ucGAAuGuuAGGuccAuGcTT B | 2227 |
| | | | | (2274C) stab19 | | |
| 2274 | GCAUGGACCUAACAUUCGAUCUC | 1534 | | JUN:2294L21 antisense siNA | GAucGAAuGuuAGGuccAuTT B | 2228 |
| | | | | (2276C) stab19 | | |
| 703 | AGUGACCGCGACUUUUCAAAGCC | 1507 | | JUN:723L21 antisense siNA | CUUUGAAAAGUCGCGGUCATT B | 2229 |
| | | | | (705C) stab22 | | |
| 1486 | CAAACCUCAGCAACUUCAACCCA | 1508 | | JUN:1506L21 antisense siNA | GGUUGAAGUUGCUGAGGUUTT B | 2230 |
| | | | | (1488C) stab22 | | |
| 1487 | AAACCUCAGCAACUUCAACCCAG | 1509 | | JUN:1507L21 antisense siNA | GGGUUGAAGUUGCUGAGGUTT B | 2231 |
| | | | | (1489C) stab22 | | |
| 1816 | AGGAAAAAGUGAAAACCUUGAAA | 1510 | | JUN:1836L21 antisense siNA | UCAAGGUUUUCACUUUUUCTT B | 2232 |
| | | | | (1818C) stab22 | | |
| 1817 | GGAAAAAGUGAAAACCUUGAAAG | 1511 | | JUN:1837L21 antisense siNA | UUCAAGGUUUUCACUUUUUTT B | 2233 |
| | | | | (1819C) stab22 | | |
| 1875 | CUCAGGGAACAGGUGGCACAGCU | 1512 | | JUN:1895L21 antisense siNA | CUGUGCCACCUGUUCCCUGTT B | 2234 |
| | | | | (1877C) stab22 | | |
| 1901 | ACAGAAAGUCAUGAACCACGUUA | 1513 | | JUN:1921L21 antisense siNA | ACGUGGUUCAUGACUUUCUTT B | 2235 |
| | | | | (1903C) stab22 | | |
| 1902 | CAGAAAGUCAUGAACCACGUUAA | 1514 | | JUN:1922L21 antisense siNA | AACGUGGUUCAUGACUUUCTT B | 2236 |
| | | | | (1904C) stab22 | | |
| 1904 | GAAAGUCAUGAACCACGUUAACA | 1515 | | JUN:1924L21 antisense siNA | UUAACGUGGUUCAUGACUUTT B | 2237 |
| | | | | (1906C) stab22 | | |
| 1907 | AGUCAUGAACCACGUUAACAGUG | 1516 | | JUN:1927L21 antisense siNA | CUGUUAACGUGGUUCAUGATT B | 2238 |
| | | | | (1909C) stab22 | | |
| 1924 | ACAGUGGGUGCCAACUCAUGCUA | 1517 | | JUN:1944L21 antisense siNA | GCAUGAGUUGGCACCCACUTT B | 2239 |
| | | | | (1926C) stab22 | | |
| 1930 | GGUGCCAACUCAUGCUAACGCAG | 1518 | | JUN:1950L21 antisense siNA | GCGUUAGCAUGAGUUGGCATT B | 2240 |
| | | | | (1932C) stab22 | | |
| 1931 | GUGCCAACUCAUGCUAACGCAGC | 1519 | | JUN:1951L21 antisense siNA | UGCGUUAGCAUGAGUUGGCTT B | 2241 |
| | | | | (1933C) stab22 | | |
| 1933 | GCCAACUCAUGCUAACGCAGCAG | 1520 | | JUN:1953L21 antisense siNA | GCUGCGUUAGCAUGAGUUGTT B | 2242 |
| | | | | (1935C) stab22 | | |
| 1934 | CCAACUCAUGCUAACGCAGCAGU | 1521 | | JUN:1954L21 antisense siNA | UGCUGCGUUAGCAUGAGUUTT B | 2243 |
| | | | | (1936C) stab22 | | |
| 1935 | CAACUCAUGCUAACGCAGCAGUU | 1522 | | JUN:1955L21 antisense siNA | CUGCUGCGUUAGCAUGAGUTT B | 2244 |
| | | | | (1937C) stab22 | | |
| 2257 | AACAUUGACCAAGAACUGCAUGG | 1523 | | JUN:2277L21 antisense siNA | AUGCAGUUCUUGGUCAAUGTT B | 2245 |
| | | | | (2259C) stab22 | | |
| 2258 | ACAUUGACCAAGAACUGCAUGGA | 1524 | | JUN:2278L21 antisense siNA | CAUGCAGUUCUUGGUCAAUTT B | 2246 |
| | | | | (2260C) stab22 | | |
| 2259 | CAUUGACCAAGAACUGCAUGGAC | 1525 | | JUN:2279L21 antisense siNA | CCAUGCAGUUCUUGGUCAATT B | 2247 |
| | | | | (2261C) stab22 | | |
| 2260 | AUUGACCAAGAACUGCAUGGACC | 1526 | | JUN:2280L21 antisense siNA | UCCAUGCAGUUCUUGGUCATT B | 2248 |
| | | | | (2262C) stab22 | | |
| 2262 | UGACCAAGAACUGCAUGGACCUA | 1527 | | JUN:2282L21 antisense siNA | GGUCCAUGCAGUUCUUGGUTT B | 2249 |
| | | | | (2264C) stab22 | | |
| 2264 | ACCAAGAACUGCAUGGACCUAAC | 1528 | | JUN:2284L21 antisense siNA | UAGGUCCAUGCAGUUCUUGTT B | 2250 |
| | | | | (2266C) stab22 | | |
| 2266 | CAAGAACUGCAUGGACCUAACAU | 1529 | | JUN:2286L21 antisense siNA | GUUAGGUCCAUGCAGUUCUTT B | 2251 |
| | | | | (2268C) stab22 | | |
| 2268 | AGAACUGCAUGGACCUAACAUUC | 1530 | | JUN:2288L21 antisense siNA | AUGUUAGGUCCAUGCAGUUTT B | 2252 |
| | | | | (2270C) stab22 | | |
| 2269 | GAACUGCAUGGACCUAACAUUCG | 1531 | | JUN:2289L21 antisense siNA | AAUGUUAGGUCCAUGCAGUTT B | 2253 |
| | | | | (2271C) stab22 | | |
| 2270 | AACUGCAUGGACCUAACAUUCGA | 1532 | | JUN:2290L21 antisense siNA | GAAUGUUAGGUCCAUGCAGTT B | 2254 |
| | | | | (2272C) stab22 | | |
| 2272 | CUGCAUGGACCUAACAUUCGAUC | 1533 | | JUN:2292L21 antisense siNA | UCGAAUGUUAGGUCCAUGCTT B | 2255 |
| | | | | (2274C) stab22 | | |
| 2274 | GCAUGGACCUAACAUUCGAUCUC | 1534 | | JUN:2294L21 antisense siNA | GAUCGAAUGUUAGGUCCAUTT B | 2256 |
| | | | | (2276C) stab22 | | |
| 2269 | GAACUGCAUGGACCUAACAUUCG | 1531 | 32018 | JUN:2271U21 sense siNA stab08 | AcuGcAuGGAccuAAcAuuTsT | 2257 |
| 2272 | CUGCAUGGACCUAACAUUCGAUC | 1533 | 32019 | JUN:2274U21 sense siNA stab08 | GcAuGGAccuAAcAuucGATsT | 2258 |
| 2269 | GAACUGCAUGGACCUAACAUUCG | 1531 | 32024 | JUN:2271U21 sense siNA stab16 | B ACUGCAUGGACCUAACAUUTT B | 2259 |
| 2272 | CUGCAUGGACCUAACAUUCGAUC | 1533 | 32025 | JUN:2274U21 sense siNA stab16 | B GCAUGGACCUAACAUUCGATT B | 2260 |
| 1819 | GGAAAAAGUGAAAACCUUGAAAG | 1511 | 31834 | JUN:1819U21 sense siNA inv | B AAGuuccAAAAGuGAAAAATT B | 2261 |
| | | | | stab07 | | |
| 1937 | CAACUCAUGCUAACGCAGCAGUU | 1522 | 31835 | JUN:1937U21 sense siNA inv | B GAcGAcGcAAucGuAcucATT B | 2262 |
| | | | | stab07 | | |
| 2261 | CAUUGACCAAGAACUGCAUGGAC | 1525 | 31836 | JUN:2261U21 sense siNA inv | B GGuAcGucAAGAAccAGuuTT B | 2263 |
| | | | | stab07 | | |
| 2266 | ACCAAGAACUGCAUGGACCUAAC | 1528 | 31837 | JUN:2266U21 sense siNA inv | B AuccAGGuAcGucAAGAAcTT B | 2264 |
| | | | | stab07 | | |
| 2271 | GAACUGCAUGGACCUAACAUUCG | 1531 | 31838 | JUN:2271U21 sense siNA inv | B uuAcAAuccAGGuAcGucATT B | 2265 |
| | | | | stab07 | | |
| 2272 | AACUGCAUGGACCUAACAUUCGA | 1532 | 31839 | JUN:2272U21 sense siNA inv | B cuuAcAAuccAGGuAcGucTT B | 2266 |
| | | | | stab07 | | |
| 2274 | CUGCAUGGACCUAACAUUCGAUC | 1533 | 31840 | JUN:2274U21 sense siNA inv | B AGcuuAcAAuccAGGuAcGTT B | 2267 |
| | | | | stab07 | | |
| 2276 | GCAUGGACCUAACAUUCGAUCUC | 1534 | 31841 | JUN:2276U21 sense siNA inv | B cuAGcuuAcAAuccAGGuATT B | 2268 |
| | | | | stab07 | | |
| 1819 | GGAAAAAGUGAAAACCUUGAAAG | 1511 | 31842 | JUN:1837L21 antisense siNA | uuuuucAcuuuuGGAAcuuTsT | 2269 |
| | | | | (1819C) inv stab08 | | |
| 1937 | CAACUCAUGCUAACGCAGCAGUU | 1522 | 31843 | JUN:1955L21 antisense siNA | uGAGuAcGAuuGcGucGucTsT | 2270 |
| | | | | (1937C) inv stab08 | | |
| 2261 | CAUUGACCAAGAACUGCAUGGAC | 1525 | 31844 | JUN:2279L21 antisense siNA | AAcuGGuucuuGAcGuAccTsT | 2271 |
| | | | | (2261C) inv stab08 | | |
| 2266 | ACCAAGAACUGCAUGGACCUAAC | 1528 | 31845 | JUN:2284L21 antisense siNA | GuucuuGAcGuAccuGGAuTsT | 2272 |
| | | | | (2266C) inv stab08 | | |
| 2271 | GAACUGCAUGGACCUAACAUUCG | 1531 | 31846 | JUN:2289L21 antisense siNA | uGAcGuAccuGGAuuGuAATsT | 2273 |
| | | | | (2271C) inv stab08 | | |
| 2272 | AACUGCAUGGACCUAACAUUCGA | 1532 | 31847 | JUN:2290L21 antisense siNA | GAcGuAccuGGAuuGuAAGTsT | 2274 |
| | | | | (2272C) inv stab08 | | |
| 2274 | CUGCAUGGACCUAACAUUCGAUC | 1533 | 31848 | JUN:2292L21 antisense siNA | cGuAccuGGAuuGuAAGcuTsT | 2275 |
| | | | | (2274C) inv stab08 | | |
| 2276 | GCAUGGACCUAACAUUCGAUCUC | 1534 | 31849 | JUN:2294L21 antisense siNA | uAccuGGAuuGuAAGcuAGTsT | 2276 |
| | | | | (2276C) inv stab08 | | |
| 2271 | GAACUGCAUGGACCUAACAUUCG | 1531 | 32026 | JUN:2271U21 sense siNA inv | UUACAAUCCAGGUACGUCATT | 2277 |
| 2274 | CUGCAUGGACCUAACAUUCGAUC | 1533 | 32027 | JUN:2274U21 sense siNA inv | AGCUUACAAUCCAGGUACGTT | 2278 |
| 2271 | GAACUGCAUGGACCUAACAUUCG | 1531 | 32028 | JUN:2289L21 antisense siNA | UGACGUACCUGGAUUGUAATT | 2279 |
| | | | | (2271C) inv | | |
| 2274 | CUGCAUGGACCUAACAUUCGAUC | 1533 | 32029 | JUN:2292L21 antisense siNA | CGUACCUGGAUUGUAAGCUTT | 2280 |
| | | | | (2274C) inv | | |
| 2271 | GAACUGCAUGGACCUAACAUUCG | 1531 | 32030 | JUN:2271U21 sense siNA inv | B uuAcAAuccAGGuAcGucATT B | 2281 |
| | | | | stab04 | | |
| 2274 | CUGCAUGGACCUAACAUUCGAUC | 1533 | 32031 | JUN:2274U21 sense siNA inv | B AGcuuAcAAuccAGGuAcGTT B | 2282 |
| | | | | stab04 | | |
| 2271 | GAACUGCAUGGACCUAACAUUCG | 1531 | 32032 | JUN:2289L21 antisense siNA | uGAcGuAccuGGAuuGuAATsT | 2283 |
| | | | | (2271C) inv stab05 | | |
| 2274 | CUGCAUGGACCUAACAUUCGAUC | 1533 | 32033 | JUN:2292L21 antisense siNA | cGuAccuGGAuuGuAAGcuTsT | 2284 |
| | | | | (2274C) inv stab05 | | |
| 2271 | GAACUGCAUGGACCUAACAUUCG | 1531 | 32034 | JUN:2271U21 sense siNA inv | uuAcAAuccAGGuAcGucATsT | 2285 |
| | | | | stab08 | | |
| 2274 | CUGCAUGGACCUAACAUUCGAUC | 1533 | 32035 | JUN:2274U21 sense siNA inv | AGcuuAcAAuccAGGuAcGTsT | 2286 |
| | | | | stab08 | | |
| 2271 | GAACUGCAUGGACCUAACAUUCG | 1531 | 32036 | JUN:2271U21 sense siNA inv | B UUACAAUCCAGGUACGUCATT B | 2287 |
| | | | | stab09 | | |
| 2274 | CUGCAUGGACCUAACAUUCGAUC | 1533 | 32037 | JUN:2274U21 sense siNA inv | B AGCUUACAAUCCAGGUACGTT B | 2288 |
| | | | | stab09 | | |
| 2271 | GAACUGCAUGGACCUAACAUUCG | 1531 | 32038 | JUN:2289L21 antisense siNA | UGACGUACCUGGAUUGUAATsT | 2289 |
| | | | | (2271C) inv stab10 | | |
| 2274 | CUGCAUGGACCUAACAUUCGAUC | 1533 | 32039 | JUN:2292L21 antisense siNA | CGUACCUGGAUUGUAAGCUTsT | 2290 |
| | | | | (2274C) inv stab10 | | |
| 2271 | GAACUGCAUGGACCUAACAUUCG | 1531 | 32040 | JUN:2271U21 sense siNA inv | B UUACAAUCCAGGUACGUCATT B | 2291 |
| | | | | stab16 | | |
| 2274 | CUGCAUGGACCUAACAUUCGAUC | 1533 | 32041 | JUN:2274U21 sense siNA inv | B AGCUUACAAUCCAGGUACGTT B | 2292 |
| | | | | stab16 | | |
| 2271 | GAACUGCAUGGACCUAACAUUCG | 1531 | 32083 | JUN:2271U21 sense siNA inv | B uuAcAAuccAGGuAcGucATT B | 2293 |
| | | | | stab18 | | |
| 2274 | CUGCAUGGACCUAACAUUCGAUC | 1533 | 32084 | JUN:2274U21 sense siNA inv | B AGcuuAcAAuccAGGuAcGTT B | 2294 |
| | | | | stab18 | | |
| 705 | AGUGACCGCGACUUUUCAAAGCC | 1507 | 32125 | JUN:705U21 sense siNA inv | B GAAAcuuuucAGcGccAGuTT B | 2295 |
| | | | | stab07 | | |
| 1488 | CAAACCUCAGCAACUUCAACCCA | 1508 | 32126 | JUN:1488U21 sense siNA inv | B ccAAcuucAAcGAcuccAATT B | 2296 |
| | | | | stab07 | | |
| 1489 | AAACCUCAGCAACUUCAACCCAG | 1509 | 32127 | JUN:1489U21 sense siNA inv | B cccAAcuucAAcGAcuccATT B | 2297 |
| | | | | stab07 | | |
| 1818 | AGGAAAAAGUGAAAACCUUGAAA | 1510 | 32128 | JUN:1818U21 sense siNA inv | B AGuuccAAAAGuGAAAAAGTT B | 2298 |
| | | | | stab07 | | |
| 1877 | CUCAGGGAACAGGUGGCACAGCU | 1512 | 32129 | JUN:1877U21 sense siNA inv | B GAcAcGGuGGAcAAGGGAcTT B | 2299 |
| | | | | stab07 | | |
| 1903 | ACAGAAAGUCAUGAACCACGUUA | 1513 | 32130 | JUN:1903U21 sense siNA inv | B uGcAccAAGuAcuGAAAGATT B | 2300 |
| | | | | stab07 | | |
| 1904 | CAGAAAGUCAUGAACCACGUUAA | 1514 | 32131 | JUN:1904U21 sense siNA inv | B uuGcAccAAGuAcuGAAAGTT B | 2301 |
| | | | | stab07 | | |
| 1906 | GAAAGUCAUGAACCACGUUAACA | 1515 | 32132 | JUN:1906U21 sense siNA inv | B AAuuGcAccAAGuAcuGAATT B | 2302 |
| | | | | stab07 | | |
| 1909 | AGUCAUGAACCACGUUAACAGUG | 1516 | 32133 | JUN:1909U21 sense siNA inv | B GAcAAuuGcAccAAGuAcuTT B | 2303 |
| | | | | stab07 | | |
| 1926 | ACAGUGGGUGCCAACUCAUGCUA | 1517 | 32134 | JUN:1926U21 sense siNA inv | B cGuAcucAAccGuGGGuGATT B | 2304 |
| | | | | stab07 | | |
| 1932 | GGUGCCAACUCAUGCUAACGCAG | 1518 | 32135 | JUN:1932U21 sense siNA inv | B cGcAAucGuAcucAAccGuTT B | 2305 |
| | | | | stab07 | | |
| 1933 | GUGCCAACUCAUGCUAACGCAGC | 1519 | 32136 | JUN:1933U21 sense siNA inv | B AcGcAAucGuAcucAAccGTT B | 2306 |
| | | | | stab07 | | |
| 1935 | GCCAACUCAUGCUAACGCAGCAG | 1520 | 32137 | JUN:1935U21 sense siNA inv | B cGAcGcAAucGuAcucAAcTT B | 2307 |
| | | | | stab07 | | |
| 1936 | CCAACUCAUGCUAACGCAGCAGU | 1521 | 32138 | JUN:1936U21 sense siNA inv | B AcGAcGcAAucGuAcucAATT B | 2308 |
| | | | | stab07 | | |
| 2259 | AACAUUGACCAAGAACUGCAUGG | 1523 | 32139 | JUN:2259U21 sense siNA inv | B uAcGucAAGAAccAGuuAcTT B | 2309 |
| | | | | stab07 | | |
| 2260 | ACAUUGACCAAGAACUGCAUGGA | 1524 | 32140 | JUN:2260U21 sense siNA inv | B GuAcGucAAGAAccAGuuATT B | 2310 |
| | | | | stab07 | | |
| 2262 | AUUGACCAAGAACUGCAUGGACC | 1526 | 32141 | JUN:2262U21 sense siNA inv | B AGGuAcGucAAGAAccAGuTT B | 2311 |
| | | | | stab07 | | |
| 2264 | UGACCAAGAACUGCAUGGACCUA | 1527 | 32142 | JUN:2264U21 sense siNA inv | B ccAGGuAcGucAAGAAccATT B | 2312 |
| | | | | stab07 | | |
| 2268 | CAAGAACUGCAUGGACCUAACAU | 1529 | 32143 | JUN:2268U21 sense siNA inv | B cAAuccAGGuAcGucAAGATT B | 2313 |
| | | | | stab07 | | |
| 2270 | AGAACUGCAUGGACCUAACAUUC | 1530 | 32144 | JUN:2270U21 sense siNA inv | B uAcAAuccAGGuAcGucAATT B | 2314 |
| | | | | stab07 | | |
| 705 | AGUGACCGCGACUUUUCAAAGCC | 1507 | 32145 | JUN:723L21 antisense siNA | AcuGGcGcuGAAAAGuuucTsT | 2315 |
| | | | | (705C) inv stab08 | | |
| 1488 | CAAACCUCAGCAACUUCAACCCA | 1508 | 32146 | JUN:1506L21 antisense siNA | uuGGAGucGuuGAAGuuGGTsT | 2316 |
| | | | | (1488C) inv stab08 | | |
| 1489 | AAACCUCAGCAACUUCAACCCAG | 1509 | 32147 | JUN:1507L21 antisense siNA | uGGAGucGuuGAAGuuGGGTsT | 2317 |
| | | | | (1489C) inv stab08 | | |
| 1818 | AGGAAAAAGUGAAAACCUUGAAA | 1510 | 32148 | JUN:1836L21 antisense siNA | cuuuuucAcuuuuGGAAcuTsT | 2318 |
| | | | | (1818C) inv stab08 | | |
| 1877 | CUCAGGGAACAGGUGGCACAGCU | 1512 | 32149 | JUN:1895L21 antisense siNA | GucccuuGuccAccGuGucTsT | 2319 |
| | | | | (1877C) inv stab08 | | |
| 1903 | ACAGAAAGUCAUGAACCACGUUA | 1513 | 32150 | JUN:1921L21 antisense siNA | ucuuucAGuAcuuGGuGcATsT | 2320 |
| | | | | (1903C) inv stab08 | | |
| 1904 | CAGAAAGUCAUGAACCACGUUAA | 1514 | 32151 | JUN:1922L21 antisense siNA | cuuucAGuAcuuGGuGcAATsT | 2321 |
| | | | | (1904C) inv stab08 | | |
| 1906 | GAAAGUCAUGAACCACGUUAACA | 1515 | 32152 | JUN:1924L21 antisense siNA | uucAGuAcuuGGuGcAAuuTsT | 2322 |
| | | | | (1906C) inv stab08 | | |
| 1909 | AGUCAUGAACCACGUUAACAGUG | 1516 | 32153 | JUN:1927L21 antisense siNA | AGuAcuuGGuGcAAuuGucTsT | 2323 |
| | | | | (1909C) inv stab08 | | |
| 1926 | ACAGUGGGUGCCAACUCAUGCUA | 1517 | 32154 | JUN:1944L21 antisense siNA | ucAcccAcGGuuGAGuAcGTsT | 2324 |
| | | | | (1926C) inv stab08 | | |
| 1932 | GGUGCCAACUCAUGCUAACGCAG | 1518 | 32155 | JUN:1950L21 antisense siNA | AcGGuuGAGuAcGAuuGcGTsT | 2325 |
| | | | | (1932C) inv stab08 | | |
| 1933 | GUGCCAACUCAUGCUAACGCAGC | 1519 | 32156 | JUN:1951L21 antisense siNA | cGGuuGAGuAcGAuuGcGuTsT | 2326 |
| | | | | (1933C) inv stab08 | | |
| 1935 | GCCAACUCAUGCUAACGCAGCAG | 1520 | 32157 | JUN:1953L21 antisense siNA | GuuGAGuAcGAuuGcGucGTsT | 2327 |
| | | | | (1935C) inv stab08 | | |
| 1936 | CCAACUCAUGCUAACGCAGCAGU | 1521 | 32158 | JUN:1954L21 antisense siNA | uuGAGuAcGAuuGcGucGuTsT | 2328 |
| | | | | (1936C) inv stab08 | | |
| 2259 | AACAUUGACCAAGAACUGCAUGG | 1523 | 32159 | JUN:2277L21 antisense siNA | GuAAcuGGuucuuGAcGuATsT | 2329 |
| | | | | (2259C) inv stab08 | | |
| 2260 | ACAUUGACCAAGAACUGCAUGGA | 1524 | 32160 | JUN:2278L21 antisense siNA | uAAcuGGuucuuGAcGuAcTsT | 2330 |
| | | | | (2260C) inv stab08 | | |
| 2262 | AUUGACCAAGAACUGCAUGGACC | 1526 | 32161 | JUN:2280L21 antisense siNA | AcuGGuucuuGAcGuAccuTsT | 2331 |
| | | | | (2262C) inv stab08 | | |
| 2264 | UGACCAAGAACUGCAUGGACCUA | 1527 | 32162 | JUN:2282L21 antisense siNA | uGGuucuuGAcGuAccuGGTsT | 2332 |
| | | | | (2264C) inv stab08 | | |
| 2268 | CAAGAACUGCAUGGACCUAACAU | 1529 | 32163 | JUN:2286L21 antisense siNA | ucuuGAcGuAccuGGAuuGTsT | 2333 |
| | | | | (2268C) inv stab08 | | |
| 2270 | AGAACUGCAUGGACCUAACAUUC | 1530 | 32164 | JUN:2288L21 antisense siNA | uuGAcGuAccuGGAuuGuATsT | 2334 |
| | | | | (2270C) inv stab08 | | |
| 1903 | ACAGAAAGUCAUGAACCACGUUA | 1513 | 32334 | JUN:1903U21 sense siNA inv | B UGCACCAAGUACUGAAAGATT B | 2335 |
| | | | | stab09 | | |
| 1906 | GAAAGUCAUGAACCACGUUAACA | 1515 | 32335 | JUN:1906U21 sense siNA inv | B AAUUGCACCAAGUACUGAATT B | 2336 |
| | | | | stab09 | | |
| 1903 | ACAGAAAGUCAUGAACCACGUUA | 1513 | 32336 | JUN:1921L21 antisense siNA | UCUUUCAGUACUUGGUGCATsT | 2337 |
| | | | | (1903C) inv stab10 | | |
| 1906 | GAAAGUCAUGAACCACGUUAACA | 1515 | 32337 | JUN:1924L21 antisense siNA | UUCAGUACUUGGUGCAAUUTsT | 2338 |
| | | | | (1906C) inv stab10 | | |

Uppercase = ribonucleotide
u, c = 2′-deoxy-2′-fluoro U, C
T = thymidine
B = inverted deoxy abasic
s = phosphorothioate linkage
A = deoxy Adenosine
G = deoxy Guanosine
G = 2′-O-methyl Guanosine
A = 2′-O-methyl Adenosine

TABLE IV
Non-limiting examples of Stabilization Chemistries for chemically
modified siNA constructs

| Chemistry | pyrimidine | Purine | cap | p = S | Strand |
|---|---|---|---|---|---|
| “Stab 00” | Ribo | Ribo | | | S/AS |
| “Stab 1” | Ribo | Ribo | — | 5 at 5′-end | S/AS |
| | | | | 1 at 3′-end | |
| “Stab 2” | Ribo | Ribo | — | All | Usually AS |
| | | | | linkages | |
| “Stab 3” | 2′-fluoro | Ribo | — | 4 at 5′-end | Usually S |
| | | | | 4 at 3′-end | |
| “Stab 4” | 2′-fluoro | Ribo | 5′ and 3′- | — | Usually S |
| | | | ends | | |
| “Stab 5” | 2′-fluoro | Ribo | — | 1 at 3′-end | Usually AS |
| “Stab 6” | 2′-O- | Ribo | 5′ and 3′- | — | Usually S |
| | Methyl | | ends | | |
| “Stab 7” | 2′-fluoro | 2′-deoxy | 5′ and 3′- | — | Usually S |
| | | | ends | | |
| “Stab 8” | 2′-fluoro | 2′-O- | — | 1 at 3′-end | S/AS |
| | | Methyl | | | |
| “Stab 9” | Ribo | Ribo | 5′ and 3′- | — | Usually S |
| | | | ends | | |
| “Stab 10” | Ribo | Ribo | — | 1 at 3′-end | Usually AS |
| “Stab 11” | 2′-fluoro | 2′-deoxy | — | 1 at 3′-end | Usually AS |
| “Stab 12” | 2′-fluoro | LNA | 5′ and 3′- | | Usually S |
| | | | ends | | |
| “Stab 13” | 2′-fluoro | LNA | | 1 at 3′-end | Usually AS |
| “Stab 14” | 2′-fluoro | 2′-deoxy | | 2 at 5′-end | Usually AS |
| | | | | 1 at 3′-end | |
| “Stab 15” | 2′-deoxy | 2′-deoxy | | 2 at 5′-end | Usually AS |
| | | | | 1 at 3′-end | |
| “Stab 16” | Ribo | 2′-O- | 5′ and 3′- | | Usually S |
| | | Methyl | ends | | |
| “Stab 17” | 2′-O- | 2′-O- | 5′ and 3′- | | Usually S |
| | Methyl | Methyl | ends | | |
| “Stab 18” | 2′-fluoro | 2′-O- | 5′ and 3′- | | Usually S |
| | | Methyl | ends | | |
| “Stab 19” | 2′-fluoro | 2′-O- | 3′-end | | S/AS |
| | | Methyl | | | |
| “Stab 20” | 2′-fluoro | 2′-deoxy | 3′-end | | Usually AS |
| “Stab 21” | 2′-fluoro | Ribo | 3′-end | | Usually AS |
| “Stab 22” | Ribo | Ribo | 3′-end | | Usually AS |
| “Stab 23” | 2′-fluoro* | 2′-deoxy* | 5′ and 3′- | | Usually S |
| | | | ends | | |
| “Stab 24” | 2′-fluoro* | 2′-O- | — | 1 at 3′-end | S/AS |
| | | Methyl* | | | |
| “Stab 25” | 2′-fluoro* | 2′-O- | — | 1 at 3′-end | S/AS |
| | | Methyl* | | | |
| “Stab 26” | 2′-fluoro* | 2′-O- | — | | S/AS |
| | | Methyl* | | | |
| “Stab 27” | 2′-fluoro* | 2′-O- | 3′-end | | S/AS |
| | | Methyl* | | | |
| “Stab 28” | 2′-fluoro* | 2′-O- | 3′-end | | S/AS |
| | | Methyl* | | | |
| “Stab 29” | 2′-fluoro* | 2′-O- | | 1 at 3′-end | S/AS |
| | | Methyl* | | | |
| “Stab 30” | 2′-fluoro* | 2′-O- | | | S/AS |
| | | Methyl* | | | |
| “Stab 31” | 2′-fluoro* | 2′-O- | 3′-end | | S/AS |
| | | Methyl* | | | |
| “Stab 32” | 2′-fluoro | 2′-O- | | | S/AS |
| | | Methyl | | | |

CAP = any terminal cap, see for example FIG. 10.
All Stab 00-32 chemistries can comprise 3′-terminal thymidine (TT) residues
All Stab 00-32 chemistries typically comprise about 21 nucleotides, but can vary as described herein.
S = sense strand
AS = antisense strand
*Stab 23 has a single ribonucleotide adjacent to 3′-CAP
*Stab 24 and Stab 28 have a single ribonucleotide at 5′-terminus
*Stab 25, Stab 26, and Stab 27 have three ribonucleotides at 5′-terminus
*Stab 29, Stab 30, and Stab 31, any purine at first three nucleotide positions from 5′-terminus are ribonucleotides
p = phosphorothioate linkage

TABLE V

| | | | | | |
|---|---|---|---|---|---|
| Reagent | Equivalents | Amount | Wait Time* DNA | Wait Time* 2′-O-methyl | Wait Time* RNA |

A. 2.5 μmol Synthesis Cycle ABI 394 Instrument

| | | | | | | | | | |
|---|---|---|---|---|---|---|---|---|---|
| Phosphoramidites | 6.5 | 163 | μL | 45 | sec | 2.5 | min | 7.5 | min |
| S-Ethyl Tetrazole | 23.8 | 238 | μL | 45 | sec | 2.5 | min | 7.5 | min |
| Acetic Anhydride | 100 | 233 | μL | 5 | sec | 5 | sec | 5 | sec |
| N-Methyl | 186 | 233 | μL | 5 | sec | 5 | sec | 5 | sec |
| Imidazole | | | | | | | | | |
| TCA | 176 | 2.3 | mL | 21 | sec | 21 | sec | 21 | sec |
| Iodine | 11.2 | 1.7 | mL | 45 | sec | 45 | sec | 45 | sec |
| Beaucage | 12.9 | 645 | μL | 100 | sec | 300 | sec | 300 | sec |
| Acetonitrile | NA | 6.67 | mL | NA | NA | NA | | | |

B. 0.2 μmol Synthesis Cycle ABI 394 Instrument

| | | | | | | | | | |
|---|---|---|---|---|---|---|---|---|---|
| Phosphoramidites | 15 | 31 | μL | 45 | sec | 233 | sec | 465 | sec |
| S-Ethyl Tetrazole | 38.7 | 31 | μL | 45 | sec | 233 | min | 465 | sec |
| Acetic Anhydride | 655 | 124 | μL | 5 | sec | 5 | sec | 5 | sec |
| N-Methyl | 1245 | 124 | μL | 5 | sec | 5 | sec | 5 | sec |
| Imidazole | | | | | | | | | |
| TCA | 700 | 732 | μL | 10 | sec | 10 | sec | 10 | sec |
| Iodine | 20.6 | 244 | μL | 15 | sec | 15 | sec | 15 | sec |
| Beaucage | 7.7 | 232 | μL | 100 | sec | 300 | sec | 300 | sec |

| | | | | | | |
|---|---|---|---|---|---|---|
| Acetonitrile | NA | 2.64 | mL | NA | NA | NA |

C. 0.2 μmol Synthesis Cycle 96 well Instrument

| | Equivalents: DNA/ | Amount: DNA/2′-O- | | | | Wait Time* | | | |
|---|---|---|---|---|---|---|---|---|---|
| Reagent | 2′-O-methyl/Ribo | methyl/Ribo | | Wait Time* DNA | | 2′-O-methyl | | Wait Time* Ribo | |
| Phosphoramidites | 22/33/66 | 40/60/120 | μL | 60 | sec | 180 | sec | 360 | sec |
| S-Ethyl Tetrazole | 70/105/210 | 40/60/120 | μL | 60 | sec | 180 | min | 360 | sec |
| Acetic Anhydride | 265/265/265 | 50/50/50 | μL | 10 | sec | 10 | sec | 10 | sec |
| N-Methyl | 502/502/502 | 50/50/50 | μL | 10 | sec | 10 | sec | 10 | sec |
| Imidazole | | | | | | | | | |
| TCA | 238/475/475 | 250/500/500 | μL | 15 | sec | 15 | sec | 15 | sec |
| Iodine | 6.8/6.8/6.8 | 80/80/80 | μL | 30 | sec | 30 | sec | 30 | sec |
| Beaucage | 34/51/51 | 80/120/120 | | 100 | sec | 200 | sec | 200 | sec |

| | | | | | | |
|---|---|---|---|---|---|---|
| Acetonitrile | NA | 1150/1150/1150 | μL | NA | NA | NA |

Wait time does not include contact time during delivery.
Tandem synthesis utilizes double coupling of linker molecule

The application's sequence listing, which the Patent Office published only in electronic form, follows.

SEQUENCE LISTING (2361 sequences)

SEQ ID NO: 1 - RNA, 19 nt, Artificial Sequence
  Synthetic
cccucccuccgcccgcccg

SEQ ID NO: 2 - RNA, 19 nt, Artificial Sequence
  Synthetic
gccggcccgcccgucaguc

SEQ ID NO: 3 - RNA, 19 nt, Artificial Sequence
  Synthetic
cuggcaggcaggcaggcaa

SEQ ID NO: 4 - RNA, 19 nt, Artificial Sequence
  Synthetic
aucgguccgaguggcuguc

SEQ ID NO: 5 - RNA, 19 nt, Artificial Sequence
  Synthetic
cggcucuucagcucucccg

SEQ ID NO: 6 - RNA, 19 nt, Artificial Sequence
  Synthetic
gcucggcgucuuccuuccu

SEQ ID NO: 7 - RNA, 19 nt, Artificial Sequence
  Synthetic
uccucccggucagcgucgg

SEQ ID NO: 8 - RNA, 19 nt, Artificial Sequence
  Synthetic
gcggcugcaccggcggcgg

SEQ ID NO: 9 - RNA, 19 nt, Artificial Sequence
  Synthetic
gcgcagucccugcgggagg

SEQ ID NO: 10 - RNA, 19 nt, Artificial Sequence
  Synthetic
gggcgacaagagcugagcg

SEQ ID NO: 11 - RNA, 19 nt, Artificial Sequence
  Synthetic
ggcggccgccgagcgucga

SEQ ID NO: 12 - RNA, 19 nt, Artificial Sequence
  Synthetic
agcucagcgcggcggaggc

SEQ ID NO: 13 - RNA, 19 nt, Artificial Sequence
  Synthetic
cggcggcggcccggcagcc

SEQ ID NO: 14 - RNA, 19 nt, Artificial Sequence
  Synthetic
caacauggcggcggcggcg

SEQ ID NO: 15 - RNA, 19 nt, Artificial Sequence
  Synthetic
ggcggcgggcgcgggcccg

SEQ ID NO: 16 - RNA, 19 nt, Artificial Sequence
  Synthetic
ggagaugguccgcgggcag

SEQ ID NO: 17 - RNA, 19 nt, Artificial Sequence
  Synthetic
gguguucgacguggggccg

SEQ ID NO: 18 - RNA, 19 nt, Artificial Sequence
  Synthetic
gcgcuacaccaaccucucg

SEQ ID NO: 19 - RNA, 19 nt, Artificial Sequence
  Synthetic
guacaucggcgagggcgcc

SEQ ID NO: 20 - RNA, 19 nt, Artificial Sequence
  Synthetic
cuacggcauggugugcucu

SEQ ID NO: 21 - RNA, 19 nt, Artificial Sequence
  Synthetic
ugcuuaugauaaugucaac

SEQ ID NO: 22 - RNA, 19 nt, Artificial Sequence
  Synthetic
caaaguucgaguagcuauc

SEQ ID NO: 23 - RNA, 19 nt, Artificial Sequence
  Synthetic
caagaaaaucagccccuuu

SEQ ID NO: 24 - RNA, 19 nt, Artificial Sequence
  Synthetic
ugagcaccagaccuacugc

SEQ ID NO: 25 - RNA, 19 nt, Artificial Sequence
  Synthetic
ccagagaacccugagggag

SEQ ID NO: 26 - RNA, 19 nt, Artificial Sequence
  Synthetic
gauaaaaaucuuacugcgc

SEQ ID NO: 27 - RNA, 19 nt, Artificial Sequence
  Synthetic
cuucagacaugagaacauc

SEQ ID NO: 28 - RNA, 19 nt, Artificial Sequence
  Synthetic
cauuggaaucaaugacauu

SEQ ID NO: 29 - RNA, 19 nt, Artificial Sequence
  Synthetic
uauucgagcaccaaccauc

SEQ ID NO: 30 - RNA, 19 nt, Artificial Sequence
  Synthetic
cgagcaaaugaaagaugua

SEQ ID NO: 31 - RNA, 19 nt, Artificial Sequence
  Synthetic
auauauaguacaggaccuc

SEQ ID NO: 32 - RNA, 19 nt, Artificial Sequence
  Synthetic
cauggaaacagaucuuuac

SEQ ID NO: 33 - RNA, 19 nt, Artificial Sequence
  Synthetic
caagcucuugaagacacaa

SEQ ID NO: 34 - RNA, 19 nt, Artificial Sequence
  Synthetic
acaccucagcaaugaccau

SEQ ID NO: 35 - RNA, 19 nt, Artificial Sequence
  Synthetic
uaucugcuauuuucucuac

SEQ ID NO: 36 - RNA, 19 nt, Artificial Sequence
  Synthetic
ccagauccucagaggguua

SEQ ID NO: 37 - RNA, 19 nt, Artificial Sequence
  Synthetic
aaaauauauccauucagcu

SEQ ID NO: 38 - RNA, 19 nt, Artificial Sequence
  Synthetic
uaacguucugcaccgugac

SEQ ID NO: 39 - RNA, 19 nt, Artificial Sequence
  Synthetic
ccucaagccuuccaaccug

SEQ ID NO: 40 - RNA, 19 nt, Artificial Sequence
  Synthetic
gcugcucaacaccaccugu

SEQ ID NO: 41 - RNA, 19 nt, Artificial Sequence
  Synthetic
ugaucucaagaucugugac

SEQ ID NO: 42 - RNA, 19 nt, Artificial Sequence
  Synthetic
cuuuggccuggcccguguu

SEQ ID NO: 43 - RNA, 19 nt, Artificial Sequence
  Synthetic
ugcagauccagaccaugau

SEQ ID NO: 44 - RNA, 19 nt, Artificial Sequence
  Synthetic
ucacacaggguuccugaca

SEQ ID NO: 45 - RNA, 19 nt, Artificial Sequence
  Synthetic
agaauauguggccacacgu

SEQ ID NO: 46 - RNA, 19 nt, Artificial Sequence
  Synthetic
uugguacagggcuccagaa

SEQ ID NO: 47 - RNA, 19 nt, Artificial Sequence
  Synthetic
aauuauguugaauuccaag

SEQ ID NO: 48 - RNA, 19 nt, Artificial Sequence
  Synthetic
gggcuacaccaaguccauu

SEQ ID NO: 49 - RNA, 19 nt, Artificial Sequence
  Synthetic
ugauauuuggucuguaggc

SEQ ID NO: 50 - RNA, 19 nt, Artificial Sequence
  Synthetic
cugcauucuggcagaaaug

SEQ ID NO: 51 - RNA, 19 nt, Artificial Sequence
  Synthetic
gcuuucuaacaggcccauc

SEQ ID NO: 52 - RNA, 19 nt, Artificial Sequence
  Synthetic
cuuuccagggaagcauuau

SEQ ID NO: 53 - RNA, 19 nt, Artificial Sequence
  Synthetic
ucuugaccagcugaaacac

SEQ ID NO: 54 - RNA, 19 nt, Artificial Sequence
  Synthetic
cauuuuggguauucuugga

SEQ ID NO: 55 - RNA, 19 nt, Artificial Sequence
  Synthetic
auccccaucacaagaagac

SEQ ID NO: 56 - RNA, 19 nt, Artificial Sequence
  Synthetic
ccugaauuguauaauaaau

SEQ ID NO: 57 - RNA, 19 nt, Artificial Sequence
  Synthetic
uuuaaaagcuaggaacuau

SEQ ID NO: 58 - RNA, 19 nt, Artificial Sequence
  Synthetic
uuugcuuucucuuccacac

SEQ ID NO: 59 - RNA, 19 nt, Artificial Sequence
  Synthetic
caaaaauaaggugccaugg

SEQ ID NO: 60 - RNA, 19 nt, Artificial Sequence
  Synthetic
gaacaggcuguucccaaau

SEQ ID NO: 61 - RNA, 19 nt, Artificial Sequence
  Synthetic
ugcugacuccaaagcucug

SEQ ID NO: 62 - RNA, 19 nt, Artificial Sequence
  Synthetic
ggacuuauuggacaaaaug

SEQ ID NO: 63 - RNA, 19 nt, Artificial Sequence
  Synthetic
guugacauucaacccacac

SEQ ID NO: 64 - RNA, 19 nt, Artificial Sequence
  Synthetic
caagaggauugaaguagaa

SEQ ID NO: 65 - RNA, 19 nt, Artificial Sequence
  Synthetic
acaggcucuggcccaccca

SEQ ID NO: 66 - RNA, 19 nt, Artificial Sequence
  Synthetic
auaucuggagcaguauuac

SEQ ID NO: 67 - RNA, 19 nt, Artificial Sequence
  Synthetic
cgacccgagugacgagccc

SEQ ID NO: 68 - RNA, 19 nt, Artificial Sequence
  Synthetic
caucgccgaagcaccauuc

SEQ ID NO: 69 - RNA, 19 nt, Artificial Sequence
  Synthetic
caaguucgacauggaauug

SEQ ID NO: 70 - RNA, 19 nt, Artificial Sequence
  Synthetic
ggaugacuugccuaaggaa

SEQ ID NO: 71 - RNA, 19 nt, Artificial Sequence
  Synthetic
aaagcucaaagaacuaauu

SEQ ID NO: 72 - RNA, 19 nt, Artificial Sequence
  Synthetic
uuuugaagagacugcuaga

SEQ ID NO: 73 - RNA, 19 nt, Artificial Sequence
  Synthetic
auuccagccaggauacaga

SEQ ID NO: 74 - RNA, 19 nt, Artificial Sequence
  Synthetic
aucuuaaauuugucaggac

SEQ ID NO: 75 - RNA, 19 nt, Artificial Sequence
  Synthetic
caagggcucagaggacugg

SEQ ID NO: 76 - RNA, 19 nt, Artificial Sequence
  Synthetic
gacgugcucagacaucggu

SEQ ID NO: 77 - RNA, 19 nt, Artificial Sequence
  Synthetic
uguucuucuucccaguucu

SEQ ID NO: 78 - RNA, 19 nt, Artificial Sequence
  Synthetic
uugaccccugguccugucu

SEQ ID NO: 79 - RNA, 19 nt, Artificial Sequence
  Synthetic
uccagcccgucuuggcuua

SEQ ID NO: 80 - RNA, 19 nt, Artificial Sequence
  Synthetic
auccacuuugacuccuuug

SEQ ID NO: 81 - RNA, 19 nt, Artificial Sequence
  Synthetic
gagccguuuggaggggcgg

SEQ ID NO: 82 - RNA, 19 nt, Artificial Sequence
  Synthetic
guuucugguaguuguggcu

SEQ ID NO: 83 - RNA, 19 nt, Artificial Sequence
  Synthetic
uuuuaugcuuucaaagaau

SEQ ID NO: 84 - RNA, 19 nt, Artificial Sequence
  Synthetic
uuucuucaguccagagaau

SEQ ID NO: 85 - RNA, 19 nt, Artificial Sequence
  Synthetic
uuccuccuggcagcccugu

SEQ ID NO: 86 - RNA, 19 nt, Artificial Sequence
  Synthetic
ugugugucacccauuggug

SEQ ID NO: 87 - RNA, 19 nt, Artificial Sequence
  Synthetic
gaccugcggcaguauguac

SEQ ID NO: 88 - RNA, 19 nt, Artificial Sequence
  Synthetic
cuucagugcaccuuacugc

SEQ ID NO: 89 - RNA, 19 nt, Artificial Sequence
  Synthetic
cuuacuguugcuuuaguca

SEQ ID NO: 90 - RNA, 19 nt, Artificial Sequence
  Synthetic
acuaauugcuuucugguuu

SEQ ID NO: 91 - RNA, 19 nt, Artificial Sequence
  Synthetic
ugaaagaugcagugguucc

SEQ ID NO: 92 - RNA, 19 nt, Artificial Sequence
  Synthetic
cucccucuccugaauccuu

SEQ ID NO: 93 - RNA, 19 nt, Artificial Sequence
  Synthetic
uuucuacaugaugcccugc

SEQ ID NO: 94 - RNA, 19 nt, Artificial Sequence
  Synthetic
cugaccaugcagccgcacc

SEQ ID NO: 95 - RNA, 19 nt, Artificial Sequence
  Synthetic
cagagagagauucuucccc

SEQ ID NO: 96 - RNA, 19 nt, Artificial Sequence
  Synthetic
caauuggcucuagucacug

SEQ ID NO: 97 - RNA, 19 nt, Artificial Sequence
  Synthetic
ggcaucucacuuuaugaua

SEQ ID NO: 98 - RNA, 19 nt, Artificial Sequence
  Synthetic
agggaaggcuacuaccuag

SEQ ID NO: 99 - RNA, 19 nt, Artificial Sequence
  Synthetic
gggcacuuuaagucaguga

SEQ ID NO: 100 - RNA, 19 nt, Artificial Sequence
  Synthetic
acagccccuuauuugcacu

SEQ ID NO: 101 - RNA, 19 nt, Artificial Sequence
  Synthetic
uucaccuuuugaccauaac

SEQ ID NO: 102 - RNA, 19 nt, Artificial Sequence
  Synthetic
cuguuuccccagagcagga

SEQ ID NO: 103 - RNA, 19 nt, Artificial Sequence
  Synthetic
agcuuguggaaauaccuug

SEQ ID NO: 104 - RNA, 19 nt, Artificial Sequence
  Synthetic
ggcugauguugcagccugc

SEQ ID NO: 105 - RNA, 19 nt, Artificial Sequence
  Synthetic
cagcaagugcuuccgucuc

SEQ ID NO: 106 - RNA, 19 nt, Artificial Sequence
  Synthetic
ccggaauccuuggggagca

SEQ ID NO: 107 - RNA, 19 nt, Artificial Sequence
  Synthetic
acuuguccacgucuuuucu

SEQ ID NO: 108 - RNA, 19 nt, Artificial Sequence
  Synthetic
ucauaucaugguagucacu

SEQ ID NO: 109 - RNA, 19 nt, Artificial Sequence
  Synthetic
uaacauauauaagguaugu

SEQ ID NO: 110 - RNA, 19 nt, Artificial Sequence
  Synthetic
ugcuauuggcccagcuuuu

SEQ ID NO: 111 - RNA, 19 nt, Artificial Sequence
  Synthetic
uagaaaaugcagucauuuu

SEQ ID NO: 112 - RNA, 19 nt, Artificial Sequence
  Synthetic
uucuaaauaaaaaggaagu

SEQ ID NO: 113 - RNA, 19 nt, Artificial Sequence
  Synthetic
uacugcacccagcaguguc

SEQ ID NO: 114 - RNA, 19 nt, Artificial Sequence
  Synthetic
cacucuguaguuacugugg

SEQ ID NO: 115 - RNA, 19 nt, Artificial Sequence
  Synthetic
gucacuuguaccauauaga

SEQ ID NO: 116 - RNA, 19 nt, Artificial Sequence
  Synthetic
agguguaacacuugucaag

SEQ ID NO: 117 - RNA, 19 nt, Artificial Sequence
  Synthetic
gaagcguuaugugcaguac

SEQ ID NO: 118 - RNA, 19 nt, Artificial Sequence
  Synthetic
cuuaauguuuguaagacuu

SEQ ID NO: 119 - RNA, 19 nt, Artificial Sequence
  Synthetic
uacaaaaaaagauuuaaag

SEQ ID NO: 120 - RNA, 19 nt, Artificial Sequence
  Synthetic
guggcagcuucacucgaca

SEQ ID NO: 121 - RNA, 19 nt, Artificial Sequence
  Synthetic
auuuggugagagaaguaca

SEQ ID NO: 122 - RNA, 19 nt, Artificial Sequence
  Synthetic
aaagguugcagugcugagc

SEQ ID NO: 123 - RNA, 19 nt, Artificial Sequence
  Synthetic
cugugggcgguuucugggg

SEQ ID NO: 124 - RNA, 19 nt, Artificial Sequence
  Synthetic
gaugucccaggguggaacu

SEQ ID NO: 125 - RNA, 19 nt, Artificial Sequence
  Synthetic
uccacaugcuggugcauau

SEQ ID NO: 126 - RNA, 19 nt, Artificial Sequence
  Synthetic
uacgcccuugagcuacuuc

SEQ ID NO: 127 - RNA, 19 nt, Artificial Sequence
  Synthetic
caaaugugguuuauaccuc

SEQ ID NO: 128 - RNA, 19 nt, Artificial Sequence
  Synthetic
cgcagauacaagaaucuuu

SEQ ID NO: 129 - RNA, 19 nt, Artificial Sequence
  Synthetic
uaugaauauacaauucuuu

SEQ ID NO: 130 - RNA, 19 nt, Artificial Sequence
  Synthetic
uuuccuucuacagcuuagc

SEQ ID NO: 131 - RNA, 19 nt, Artificial Sequence
  Synthetic
cuccgucuuuucaaccacg

SEQ ID NO: 132 - RNA, 19 nt, Artificial Sequence
  Synthetic
gaacauuuaaaacccgacc

SEQ ID NO: 133 - RNA, 19 nt, Artificial Sequence
  Synthetic
cuacuagcacuguucuguc

SEQ ID NO: 134 - RNA, 19 nt, Artificial Sequence
  Synthetic
ccucaaguacucaaauauu

SEQ ID NO: 135 - RNA, 19 nt, Artificial Sequence
  Synthetic
uucugauacugcugaguca

SEQ ID NO: 136 - RNA, 19 nt, Artificial Sequence
  Synthetic
agacugucagaaaaagcua

SEQ ID NO: 137 - RNA, 19 nt, Artificial Sequence
  Synthetic
agcacuaacucguguuugg

SEQ ID NO: 138 - RNA, 19 nt, Artificial Sequence
  Synthetic
gagcucuauccauauuuua

SEQ ID NO: 139 - RNA, 19 nt, Artificial Sequence
  Synthetic
acugaucucuuuaaguauu

SEQ ID NO: 140 - RNA, 19 nt, Artificial Sequence
  Synthetic
uuguuccugccacugugua

SEQ ID NO: 141 - RNA, 19 nt, Artificial Sequence
  Synthetic
acuguggaguugacucggu

SEQ ID NO: 142 - RNA, 19 nt, Artificial Sequence
  Synthetic
uguucugucccagugcggu

SEQ ID NO: 143 - RNA, 19 nt, Artificial Sequence
  Synthetic
ugccuccucuugacuuccc

SEQ ID NO: 144 - RNA, 19 nt, Artificial Sequence
  Synthetic
ccacugcucucugugguga

SEQ ID NO: 145 - RNA, 19 nt, Artificial Sequence
  Synthetic
agaaauuugccuuguucaa

SEQ ID NO: 146 - RNA, 19 nt, Artificial Sequence
  Synthetic
auaauuacuguacccucgc

SEQ ID NO: 147 - RNA, 19 nt, Artificial Sequence
  Synthetic
caugacuguuacagcuuuc

SEQ ID NO: 148 - RNA, 19 nt, Artificial Sequence
  Synthetic
cugugcagagaugacuguc

SEQ ID NO: 149 - RNA, 19 nt, Artificial Sequence
  Synthetic
ccaagugccacaugccuac

SEQ ID NO: 150 - RNA, 19 nt, Artificial Sequence
  Synthetic
cgauugaaaugaaaacucu

SEQ ID NO: 151 - RNA, 19 nt, Artificial Sequence
  Synthetic
uauuguuaccucugaguug

SEQ ID NO: 152 - RNA, 19 nt, Artificial Sequence
  Synthetic
guguuccacggaaaaugcu

SEQ ID NO: 153 - RNA, 19 nt, Artificial Sequence
  Synthetic
uauccagcagaucauuuag

SEQ ID NO: 154 - RNA, 19 nt, Artificial Sequence
  Synthetic
ggaaaaauaauucuauuuu

SEQ ID NO: 155 - RNA, 19 nt, Artificial Sequence
  Synthetic
uuagcuuuucauuucucag

SEQ ID NO: 156 - RNA, 19 nt, Artificial Sequence
  Synthetic
gcuguccuuuuuucuuguu

SEQ ID NO: 157 - RNA, 19 nt, Artificial Sequence
  Synthetic
uugauuuuugacagcaaug

SEQ ID NO: 158 - RNA, 19 nt, Artificial Sequence
  Synthetic
ggagaauggguuauauaaa

SEQ ID NO: 159 - RNA, 19 nt, Artificial Sequence
  Synthetic
agacugccugcuaauauga

SEQ ID NO: 160 - RNA, 19 nt, Artificial Sequence
  Synthetic
aacagaaaugcauuuguaa

SEQ ID NO: 161 - RNA, 19 nt, Artificial Sequence
  Synthetic
auucaugaaaauaaaugua

SEQ ID NO: 162 - RNA, 19 nt, Artificial Sequence
  Synthetic
acaucuucuaucuucaaaa

SEQ ID NO: 163 - RNA, 19 nt, Artificial Sequence
  Synthetic
uucaaaaaaaaaaaaaaaa

SEQ ID NO: 164 - RNA, 19 nt, Artificial Sequence
  Synthetic
cgggcgggcggagggaggg

SEQ ID NO: 165 - RNA, 19 nt, Artificial Sequence
  Synthetic
gacugacgggcgggccggc

SEQ ID NO: 166 - RNA, 19 nt, Artificial Sequence
  Synthetic
uugccugccugccugccag

SEQ ID NO: 167 - RNA, 19 nt, Artificial Sequence
  Synthetic
gacagccacucggaccgau

SEQ ID NO: 168 - RNA, 19 nt, Artificial Sequence
  Synthetic
cgggagagcugaagagccg

SEQ ID NO: 169 - RNA, 19 nt, Artificial Sequence
  Synthetic
aggaaggaagacgccgagc

SEQ ID NO: 170 - RNA, 19 nt, Artificial Sequence
  Synthetic
ccgacgcugaccgggagga

SEQ ID NO: 171 - RNA, 19 nt, Artificial Sequence
  Synthetic
ccgccgccggugcagccgc

SEQ ID NO: 172 - RNA, 19 nt, Artificial Sequence
  Synthetic
ccucccgcagggacugcgc

SEQ ID NO: 173 - RNA, 19 nt, Artificial Sequence
  Synthetic
cgcucagcucuugucgccc

SEQ ID NO: 174 - RNA, 19 nt, Artificial Sequence
  Synthetic
ucgacgcucggcggccgcc

SEQ ID NO: 175 - RNA, 19 nt, Artificial Sequence
  Synthetic
gccuccgccgcgcugagcu

SEQ ID NO: 176 - RNA, 19 nt, Artificial Sequence
  Synthetic
ggcugccgggccgccgccg

SEQ ID NO: 177 - RNA, 19 nt, Artificial Sequence
  Synthetic
cgccgccgccgccauguug

SEQ ID NO: 178 - RNA, 19 nt, Artificial Sequence
  Synthetic
cgggcccgcgcccgccgcc

SEQ ID NO: 179 - RNA, 19 nt, Artificial Sequence
  Synthetic
cugcccgcggaccaucucc

SEQ ID NO: 180 - RNA, 19 nt, Artificial Sequence
  Synthetic
cggccccacgucgaacacc

SEQ ID NO: 181 - RNA, 19 nt, Artificial Sequence
  SYnthetic
cgagagguugguguagcgc

SEQ ID NO: 182 - RNA, 19 nt, Artificial Sequence
  Synthetic
ggcgcccucgccgauguac

SEQ ID NO: 183 - RNA, 19 nt, Artificial Sequence
  Synthetic
agagcacaccaugccguag

SEQ ID NO: 184 - RNA, 19 nt, Artificial Sequence
  Synthetic
guugacauuaucauaagca

SEQ ID NO: 185 - RNA, 19 nt, Artificial Sequence
  Synthetic
gauagcuacucgaacuuug

SEQ ID NO: 186 - RNA, 19 nt, Artificial Sequence
  Synthetic
aaaggggcugauuuucuug

SEQ ID NO: 187 - RNA, 19 nt, Artificial Sequence
  Synthetic
gcaguaggucuggugcuca

SEQ ID NO: 188 - RNA, 19 nt, Artificial Sequence
  Synthetic
cucccucaggguucucugg

SEQ ID NO: 189 - RNA, 19 nt, Artificial Sequence
  Synthetic
gcgcaguaagauuuuuauc

SEQ ID NO: 190 - RNA, 19 nt, Artificial Sequence
  Synthetic
gauguucucaugucugaag

SEQ ID NO: 191 - RNA, 19 nt, Artificial Sequence
  Synthetic
aaugucauugauuccaaug

SEQ ID NO: 192 - RNA, 19 nt, Artificial Sequence
  Synthetic
gaugguuggugcucgaaua

SEQ ID NO: 193 - RNA, 19 nt, Artificial Sequence
  Synthetic
uacaucuuucauuugcucg

SEQ ID NO: 194 - RNA, 19 nt, Artificial Sequence
  Synthetic
gagguccuguacuauauau

SEQ ID NO: 195 - RNA, 19 nt, Artificial Sequence
  Synthetic
guaaagaucuguuuccaug

SEQ ID NO: 196 - RNA, 19 nt, Artificial Sequence
  Synthetic
uugugucuucaagagcuug

SEQ ID NO: 197 - RNA, 19 nt, Artificial Sequence
  Synthetic
auggucauugcugaggugu

SEQ ID NO: 198 - RNA, 19 nt, Artificial Sequence
  Synthetic
guagagaaaauagcagaua

SEQ ID NO: 199 - RNA, 19 nt, Artificial Sequence
  Synthetic
uaacccucugaggaucugg

SEQ ID NO: 200 - RNA, 19 nt, Artificial Sequence
  Synthetic
agcugaauggauauauuuu

SEQ ID NO: 201 - RNA, 19 nt, Artificial Sequence
  Synthetic
gucacggugcagaacguua

SEQ ID NO: 202 - RNA, 19 nt, Artificial Sequence
  Synthetic
cagguuggaaggcuugagg

SEQ ID NO: 203 - RNA, 19 nt, Artificial Sequence
  Synthetic
acaggugguguugagcagc

SEQ ID NO: 204 - RNA, 19 nt, Artificial Sequence
  Synthetic
gucacagaucuugagauca

SEQ ID NO: 205 - RNA, 19 nt, Artificial Sequence
  Synthetic
aacacgggccaggccaaag

SEQ ID NO: 206 - RNA, 19 nt, Artificial Sequence
  Synthetic
aucauggucuggaucugca

SEQ ID NO: 207 - RNA, 19 nt, Artificial Sequence
  Synthetic
ugucaggaacccuguguga

SEQ ID NO: 208 - RNA, 19 nt, Artificial Sequence
  Synthetic
acguguggccacauauucu

SEQ ID NO: 209 - RNA, 19 nt, Artificial Sequence
  Synthetic
uucuggagcccuguaccaa

SEQ ID NO: 210 - RNA, 19 nt, Artificial Sequence
  Synthetic
cuuggaauucaacauaauu

SEQ ID NO: 211 - RNA, 19 nt, Artificial Sequence
  Synthetic
aauggacuugguguagccc

SEQ ID NO: 212 - RNA, 19 nt, Artificial Sequence
  Synthetic
gccuacagaccaaauauca

SEQ ID NO: 213 - RNA, 19 nt, Artificial Sequence
  Synthetic
cauuucugccagaaugcag

SEQ ID NO: 214 - RNA, 19 nt, Artificial Sequence
  Synthetic
gaugggccuguuagaaagc

SEQ ID NO: 215 - RNA, 19 nt, Artificial Sequence
  Synthetic
auaaugcuucccuggaaag

SEQ ID NO: 216 - RNA, 19 nt, Artificial Sequence
  Synthetic
guguuucagcuggucaaga

SEQ ID NO: 217 - RNA, 19 nt, Artificial Sequence
  Synthetic
uccaagaauacccaaaaug

SEQ ID NO: 218 - RNA, 19 nt, Artificial Sequence
  Synthetic
gucuucuugugauggggau

SEQ ID NO: 219 - RNA, 19 nt, Artificial Sequence
  Synthetic
auuuauuauacaauucagg

SEQ ID NO: 220 - RNA, 19 nt, Artificial Sequence
  Synthetic
auaguuccuagcuuuuaaa

SEQ ID NO: 221 - RNA, 19 nt, Artificial Sequence
  Synthetic
guguggaagagaaagcaaa

SEQ ID NO: 222 - RNA, 19 nt, Artificial Sequence
  Synthetic
ccauggcaccuuauuuuug

SEQ ID NO: 223 - RNA, 19 nt, Artificial Sequence
  Synthetic
auuugggaacagccuguuc

SEQ ID NO: 224 - RNA, 19 nt, Artificial Sequence
  Synthetic
cagagcuuuggagucagca

SEQ ID NO: 225 - RNA, 19 nt, Artificial Sequence
  Synthetic
cauuuuguccaauaagucc

SEQ ID NO: 226 - RNA, 19 nt, Artificial Sequence
  Synthetic
guguggguugaaugucaac

SEQ ID NO: 227 - RNA, 19 nt, Artificial Sequence
  Synthetic
uucuacuucaauccucuug

SEQ ID NO: 228 - RNA, 19 nt, Artificial Sequence
  Synthetic
ugggugggccagagccugu

SEQ ID NO: 229 - RNA, 19 nt, Artificial Sequence
  Synthetic
guaauacugcuccagauau

SEQ ID NO: 230 - RNA, 19 nt, Artificial Sequence
  Synthetic
gggcucgucacucgggucg

SEQ ID NO: 231 - RNA, 19 nt, Artificial Sequence
  Synthetic
gaauggugcuucggcgaug

SEQ ID NO: 232 - RNA, 19 nt, Artificial Sequence
  Synthetic
caauuccaugucgaacuug

SEQ ID NO: 233 - RNA, 19 nt, Artificial Sequence
  Synthetic
uuccuuaggcaagucaucc

SEQ ID NO: 234 - RNA, 19 nt, Artificial Sequence
  Synthetic
aauuaguucuuugagcuuu

SEQ ID NO: 235 - RNA, 19 nt, Artificial Sequence
  Synthetic
ucuagcagucucuucaaaa

SEQ ID NO: 236 - RNA, 19 nt, Artificial Sequence
  Synthetic
ucuguauccuggcuggaau

SEQ ID NO: 237 - RNA, 19 nt, Artificial Sequence
  Synthetic
guccugacaaauuuaagau

SEQ ID NO: 238 - RNA, 19 nt, Artificial Sequence
  Synthetic
ccaguccucugagcccuug

SEQ ID NO: 239 - RNA, 19 nt, Artificial Sequence
  Synthetic
accgaugucugagcacguc

SEQ ID NO: 240 - RNA, 19 nt, Artificial Sequence
  Synthetic
agaacugggaagaagaaca

SEQ ID NO: 241 - RNA, 19 nt, Artificial Sequence
  Synthetic
agacaggaccaggggucaa

SEQ ID NO: 242 - RNA, 19 nt, Artificial Sequence
  Synthetic
uaagccaagacgggcugga

SEQ ID NO: 243 - RNA, 19 nt, Artificial Sequence
  Synthetic
caaaggagucaaaguggau

SEQ ID NO: 244 - RNA, 19 nt, Artificial Sequence
  Synthetic
ccgccccuccaaacggcuc

SEQ ID NO: 245 - RNA, 19 nt, Artificial Sequence
  Synthetic
agccacaacuaccagaaac

SEQ ID NO: 246 - RNA, 19 nt, Artificial Sequence
  Synthetic
auucuuugaaagcauaaaa

SEQ ID NO: 247 - RNA, 19 nt, Artificial Sequence
  Synthetic
auucucuggacugaagaaa

SEQ ID NO: 248 - RNA, 19 nt, Artificial Sequence
  Synthetic
acagggcugccaggaggaa

SEQ ID NO: 249 - RNA, 19 nt, Artificial Sequence
  Synthetic
caccaaugggugacacaca

SEQ ID NO: 250 - RNA, 19 nt, Artificial Sequence
  Synthetic
guacauacugccgcagguc

SEQ ID NO: 251 - RNA, 19 nt, Artificial Sequence
  Synthetic
gcaguaaggugcacugaag

SEQ ID NO: 252 - RNA, 19 nt, Artificial Sequence
  Synthetic
ugacuaaagcaacaguaag

SEQ ID NO: 253 - RNA, 19 nt, Artificial Sequence
  Synthetic
aaaccagaaagcaauuagu

SEQ ID NO: 254 - RNA, 19 nt, Artificial Sequence
  Synthetic
ggaaccacugcaucuuuca

SEQ ID NO: 255 - RNA, 19 nt, Artificial Sequence
  Synthetic
aaggauucaggagagggag

SEQ ID NO: 256 - RNA, 19 nt, Artificial Sequence
  Synthetic
gcagggcaucauguagaaa

SEQ ID NO: 257 - RNA, 19 nt, Artificial Sequence
  Synthetic
ggugcggcugcauggucag

SEQ ID NO: 258 - RNA, 19 nt, Artificial Sequence
  Synthetic
ggggaagaaucucucucug

SEQ ID NO: 259 - RNA, 19 nt, Artificial Sequence
  Synthetic
cagugacuagagccaauug

SEQ ID NO: 260 - RNA, 19 nt, Artificial Sequence
  Synthetic
uaucauaaagugagaugcc

SEQ ID NO: 261 - RNA, 19 nt, Artificial Sequence
  Synthetic
cuagguaguagccuucccu

SEQ ID NO: 262 - RNA, 19 nt, Artificial Sequence
  Synthetic
ucacugacuuaaagugccc

SEQ ID NO: 263 - RNA, 19 nt, Artificial Sequence
  Synthetic
agugcaaauaaggggcugu

SEQ ID NO: 264 - RNA, 19 nt, Artificial Sequence
  Synthetic
guuauggucaaaaggugaa

SEQ ID NO: 265 - RNA, 19 nt, Artificial Sequence
  Synthetic
uccugcucuggggaaacag

SEQ ID NO: 266 - RNA, 19 nt, Artificial Sequence
  Synthetic
caagguauuuccacaagcu

SEQ ID NO: 267 - RNA, 19 nt, Artificial Sequence
  Synthetic
gcaggcugcaacaucagcc

SEQ ID NO: 268 - RNA, 19 nt, Artificial Sequence
  Synthetic
gagacggaagcacuugcug

SEQ ID NO: 269 - RNA, 19 nt, Artificial Sequence
  Synthetic
ugcuccccaaggauuccgg

SEQ ID NO: 270 - RNA, 19 nt, Artificial Sequence
  Synthetic
agaaaagacguggacaagu

SEQ ID NO: 271 - RNA, 19 nt, Artificial Sequence
  Synthetic
agugacuaccaugauauga

SEQ ID NO: 272 - RNA, 19 nt, Artificial Sequence
  Synthetic
acauaccuuauauauguua

SEQ ID NO: 273 - RNA, 19 nt, Artificial Sequence
  Synthetic
aaaagcugggccaauagca

SEQ ID NO: 274 - RNA, 19 nt, Artificial Sequence
  Synthetic
aaaaugacugcauuuucua

SEQ ID NO: 275 - RNA, 19 nt, Artificial Sequence
  Synthetic
acuuccuuuuuauuuagaa

SEQ ID NO: 276 - RNA, 19 nt, Artificial Sequence
  Synthetic
gacacugcugggugcagua

SEQ ID NO: 277 - RNA, 19 nt, Artificial Sequence
  Synthetic
ccacaguaacuacagagug

SEQ ID NO: 278 - RNA, 19 nt, Artificial Sequence
  Synthetic
ucuauaugguacaagugac

SEQ ID NO: 279 - RNA, 19 nt, Artificial Sequence
  Synthetic
cuugacaaguguuacaccu

SEQ ID NO: 280 - RNA, 19 nt, Artificial Sequence
  Synthetic
guacugcacauaacgcuuc

SEQ ID NO: 281 - RNA, 19 nt, Artificial Sequence
  Synthetic
aagucuuacaaacauuaag

SEQ ID NO: 282 - RNA, 19 nt, Artificial Sequence
  Synthetic
cuuuaaaucuuuuuuugua

SEQ ID NO: 283 - RNA, 19 nt, Artificial Sequence
  Synthetic
ugucgagugaagcugccac

SEQ ID NO: 284 - RNA, 19 nt, Artificial Sequence
  Synthetic
uguacuucucucaccaaau

SEQ ID NO: 285 - RNA, 19 nt, Artificial Sequence
  Synthetic
gcucagcacugcaaccuuu

SEQ ID NO: 286 - RNA, 19 nt, Artificial Sequence
  Synthetic
ccccagaaaccgcccacag

SEQ ID NO: 287 - RNA, 19 nt, Artificial Sequence
  Synthetic
aguuccacccugggacauc

SEQ ID NO: 288 - RNA, 19 nt, Artificial Sequence
  Synthetic
auaugcaccagcaugugga

SEQ ID NO: 289 - RNA, 19 nt, Artificial Sequence
  Synthetic
gaaguagcucaagggcgua

SEQ ID NO: 290 - RNA, 19 nt, Artificial Sequence
  Synthetic
gagguauaaaccacauuug

SEQ ID NO: 291 - RNA, 19 nt, Artificial Sequence
  Synthetic
aaagauucuuguaucugcg

SEQ ID NO: 292 - RNA, 19 nt, Artificial Sequence
  Synthetic
aaagaauuguauauucaua

SEQ ID NO: 293 - RNA, 19 nt, Artificial Sequence
  Synthetic
gcuaagcuguagaaggaaa

SEQ ID NO: 294 - RNA, 19 nt, Artificial Sequence
  Synthetic
cgugguugaaaagacggag

SEQ ID NO: 295 - RNA, 19 nt, Artificial Sequence
  Synthetic
ggucggguuuuaaauguuc

SEQ ID NO: 296 - RNA, 19 nt, Artificial Sequence
  Synthetic
gacagaacagugcuaguag

SEQ ID NO: 297 - RNA, 19 nt, Artificial Sequence
  Synthetic
aauauuugaguacuugagg

SEQ ID NO: 298 - RNA, 19 nt, Artificial Sequence
  Synthetic
ugacucagcaguaucagaa

SEQ ID NO: 299 - RNA, 19 nt, Artificial Sequence
  Synthetic
uagcuuuuucugacagucu

SEQ ID NO: 300 - RNA, 19 nt, Artificial Sequence
  Synthetic
ccaaacacgaguuagugcu

SEQ ID NO: 301 - RNA, 19 nt, Artificial Sequence
  Synthetic
uaaaauauggauagagcuc

SEQ ID NO: 302 - RNA, 19 nt, Artificial Sequence
  Synthetic
aauacuuaaagagaucagu

SEQ ID NO: 303 - RNA, 19 nt, Artificial Sequence
  Synthetic
uacacaguggcaggaacaa

SEQ ID NO: 304 - RNA, 19 nt, Artificial Sequence
  Synthetic
accgagucaacuccacagu

SEQ ID NO: 305 - RNA, 19 nt, Artificial Sequence
  Synthetic
accgcacugggacagaaca

SEQ ID NO: 306 - RNA, 19 nt, Artificial Sequence
  Synthetic
gggaagucaagaggaggca

SEQ ID NO: 307 - RNA, 19 nt, Artificial Sequence
  Synthetic
ucaccacagagagcagugg

SEQ ID NO: 308 - RNA, 19 nt, Artificial Sequence
  Synthetic
uugaacaaggcaaauuucu

SEQ ID NO: 309 - RNA, 19 nt, Artificial Sequence
  Synthetic
gcgaggguacaguaauuau

SEQ ID NO: 310 - RNA, 19 nt, Artificial Sequence
  Synthetic
gaaagcuguaacagucaug

SEQ ID NO: 311 - RNA, 19 nt, Artificial Sequence
  Synthetic
gacagucaucucugcacag

SEQ ID NO: 312 - RNA, 19 nt, Artificial Sequence
  Synthetic
guaggcauguggcacuugg

SEQ ID NO: 313 - RNA, 19 nt, Artificial Sequence
  Synthetic
agaguuuucauuucaaucg

SEQ ID NO: 314 - RNA, 19 nt, Artificial Sequence
  Synthetic
caacucagagguaacaaua

SEQ ID NO: 315 - RNA, 19 nt, Artificial Sequence
  Synthetic
agcauuuuccguggaacac

SEQ ID NO: 316 - RNA, 19 nt, Artificial Sequence
  Synthetic
cuaaaugaucugcuggaua

SEQ ID NO: 317 - RNA, 19 nt, Artificial Sequence
  Synthetic
aaaauagaauuauuuuucc

SEQ ID NO: 318 - RNA, 19 nt, Artificial Sequence
  Synthetic
cugagaaaugaaaagcuaa

SEQ ID NO: 319 - RNA, 19 nt, Artificial Sequence
  Synthetic
aacaagaaaaaaggacagc

SEQ ID NO: 320 - RNA, 19 nt, Artificial Sequence
  Synthetic
cauugcugucaaaaaucaa

SEQ ID NO: 321 - RNA, 19 nt, Artificial Sequence
  Synthetic
uuuauauaacccauucucc

SEQ ID NO: 322 - RNA, 19 nt, Artificial Sequence
  Synthetic
ucauauuagcaggcagucu

SEQ ID NO: 323 - RNA, 19 nt, Artificial Sequence
  Synthetic
uuacaaaugcauuucuguu

SEQ ID NO: 324 - RNA, 19 nt, Artificial Sequence
  Synthetic
uacauuuauuuucaugaau

SEQ ID NO: 325 - RNA, 19 nt, Artificial Sequence
  Synthetic
uuuugaagauagaagaugu

SEQ ID NO: 326 - RNA, 19 nt, Artificial Sequence
  Synthetic
uuuuuuuuuuuuuuuugaa

SEQ ID NO: 327 - RNA, 19 nt, Artificial Sequence
  Synthetic
cggggccucgggcggggcc

SEQ ID NO: 328 - RNA, 19 nt, Artificial Sequence
  Synthetic
cgccguggggaggagggcg

SEQ ID NO: 329 - RNA, 19 nt, Artificial Sequence
  Synthetic
ggugggaggggaggagugg

SEQ ID NO: 330 - RNA, 19 nt, Artificial Sequence
  Synthetic
gagauggcggcggcggcgg

SEQ ID NO: 331 - RNA, 19 nt, Artificial Sequence
  Synthetic
gcucaggggggcgggggcg

SEQ ID NO: 332 - RNA, 19 nt, Artificial Sequence
  Synthetic
ggggagccccguagaaccg

SEQ ID NO: 333 - RNA, 19 nt, Artificial Sequence
  Synthetic
gagggggucggcccggggg

SEQ ID NO: 334 - RNA, 19 nt, Artificial Sequence
  Synthetic
gucccgggggagguggaga

SEQ ID NO: 335 - RNA, 19 nt, Artificial Sequence
  Synthetic
auggugaaggggcagccgu

SEQ ID NO: 336 - RNA, 19 nt, Artificial Sequence
  Synthetic
uucgacgugggcccgcgcu

SEQ ID NO: 337 - RNA, 19 nt, Artificial Sequence
  Synthetic
uacacgcaguugcaguaca

SEQ ID NO: 338 - RNA, 19 nt, Artificial Sequence
  Synthetic
aucggcgagggcgcguacg

SEQ ID NO: 339 - RNA, 19 nt, Artificial Sequence
  Synthetic
ggcauggucagcucggccu

SEQ ID NO: 340 - RNA, 19 nt, Artificial Sequence
  Synthetic
uaugaccacgugcgcaaga

SEQ ID NO: 341 - RNA, 19 nt, Artificial Sequence
  Synthetic
acucgcguggccaucaaga

SEQ ID NO: 342 - RNA, 19 nt, Artificial Sequence
  Synthetic
aagaucagccccuucgaac

SEQ ID NO: 343 - RNA, 19 nt, Artificial Sequence
  Synthetic
caucagaccuacugccagc

SEQ ID NO: 344 - RNA, 19 nt, Artificial Sequence
  Synthetic
cgcacgcuccgggagaucc

SEQ ID NO: 345 - RNA, 19 nt, Artificial Sequence
  Synthetic
cagauccugcugcgcuucc

SEQ ID NO: 346 - RNA, 19 nt, Artificial Sequence
  Synthetic
cgccaugagaaugucaucg

SEQ ID NO: 347 - RNA, 19 nt, Artificial Sequence
  Synthetic
ggcauccgagacauucugc

SEQ ID NO: 348 - RNA, 19 nt, Artificial Sequence
  Synthetic
cgggcguccacccuggaag

SEQ ID NO: 349 - RNA, 19 nt, Artificial Sequence
  Synthetic
gccaugagagaugucuaca

SEQ ID NO: 350 - RNA, 19 nt, Artificial Sequence
  Synthetic
auugugcaggaccugaugg

SEQ ID NO: 351 - RNA, 19 nt, Artificial Sequence
  Synthetic
gagacugaccuguacaagu

SEQ ID NO: 352 - RNA, 19 nt, Artificial Sequence
  Synthetic
uugcugaaaagccagcagc

SEQ ID NO: 353 - RNA, 19 nt, Artificial Sequence
  Synthetic
cugagcaaugaccauaucu

SEQ ID NO: 354 - RNA, 19 nt, Artificial Sequence
  Synthetic
ugcuacuuccucuaccaga

SEQ ID NO: 355 - RNA, 19 nt, Artificial Sequence
  Synthetic
auccugcggggccucaagu

SEQ ID NO: 356 - RNA, 19 nt, Artificial Sequence
  Synthetic
uacauccacuccgccaacg

SEQ ID NO: 357 - RNA, 19 nt, Artificial Sequence
  Synthetic
gugcuccaccgagaucuaa

SEQ ID NO: 358 - RNA, 19 nt, Artificial Sequence
  Synthetic
aagcccuccaaccugcuca

SEQ ID NO: 359 - RNA, 19 nt, Artificial Sequence
  Synthetic
aucaacaccaccugcgacc

SEQ ID NO: 360 - RNA, 19 nt, Artificial Sequence
  Synthetic
cuuaagauuugugauuucg

SEQ ID NO: 361 - RNA, 19 nt, Artificial Sequence
  Synthetic
ggccuggcccggauugccg

SEQ ID NO: 362 - RNA, 19 nt, Artificial Sequence
  Synthetic
gauccugagcaugaccaca

SEQ ID NO: 363 - RNA, 19 nt, Artificial Sequence
  Synthetic
accggcuuccugacggagu

SEQ ID NO: 364 - RNA, 19 nt, Artificial Sequence
  Synthetic
uauguggcuacgcgcuggu

SEQ ID NO: 365 - RNA, 19 nt, Artificial Sequence
  Synthetic
uaccgggccccagagauca

SEQ ID NO: 366 - RNA, 19 nt, Artificial Sequence
  Synthetic
augcugaacuccaagggcu

SEQ ID NO: 367 - RNA, 19 nt, Artificial Sequence
  Synthetic
uauaccaaguccaucgaca

SEQ ID NO: 368 - RNA, 19 nt, Artificial Sequence
  Synthetic
aucuggucugugggcugca

SEQ ID NO: 369 - RNA, 19 nt, Artificial Sequence
  Synthetic
auucuggcugagaugcucu

SEQ ID NO: 370 - RNA, 19 nt, Artificial Sequence
  Synthetic
ucuaaccggcccaucuucc

SEQ ID NO: 371 - RNA, 19 nt, Artificial Sequence
  Synthetic
ccuggcaagcacuaccugg

SEQ ID NO: 372 - RNA, 19 nt, Artificial Sequence
  Synthetic
gaucagcucaaccacauuc

SEQ ID NO: 373 - RNA, 19 nt, Artificial Sequence
  Synthetic
cugggcauccugggcuccc

SEQ ID NO: 374 - RNA, 19 nt, Artificial Sequence
  Synthetic
ccaucccaggaggaccuga

SEQ ID NO: 375 - RNA, 19 nt, Artificial Sequence
  Synthetic
aauuguaucaucaacauga

SEQ ID NO: 376 - RNA, 19 nt, Artificial Sequence
  Synthetic
aaggcccgaaacuaccuac

SEQ ID NO: 377 - RNA, 19 nt, Artificial Sequence
  Synthetic
cagucucugcccuccaaga

SEQ ID NO: 378 - RNA, 19 nt, Artificial Sequence
  Synthetic
accaagguggcuugggcca

SEQ ID NO: 379 - RNA, 19 nt, Artificial Sequence
  Synthetic
aagcuuuuccccaagucag

SEQ ID NO: 380 - RNA, 19 nt, Artificial Sequence
  Synthetic
gacuccaaagcccuugacc

SEQ ID NO: 381 - RNA, 19 nt, Artificial Sequence
  Synthetic
cugcuggaccggauguuaa

SEQ ID NO: 382 - RNA, 19 nt, Artificial Sequence
  Synthetic
accuuuaaccccaauaaac

SEQ ID NO: 383 - RNA, 19 nt, Artificial Sequence
  Synthetic
cggaucacaguggaggaag

SEQ ID NO: 384 - RNA, 19 nt, Artificial Sequence
  Synthetic
gcgcuggcucaccccuacc

SEQ ID NO: 385 - RNA, 19 nt, Artificial Sequence
  Synthetic
cuggagcaguacuaugacc

SEQ ID NO: 386 - RNA, 19 nt, Artificial Sequence
  Synthetic
ccgacggaugagccagugg

SEQ ID NO: 387 - RNA, 19 nt, Artificial Sequence
  Synthetic
gccgaggagcccuucaccu

SEQ ID NO: 388 - RNA, 19 nt, Artificial Sequence
  Synthetic
uucgccauggagcuggaug

SEQ ID NO: 389 - RNA, 19 nt, Artificial Sequence
  Synthetic
gaccuaccuaaggagcggc

SEQ ID NO: 390 - RNA, 19 nt, Artificial Sequence
  Synthetic
cugaaggagcucaucuucc

SEQ ID NO: 391 - RNA, 19 nt, Artificial Sequence
  Synthetic
caggagacagcacgcuucc

SEQ ID NO: 392 - RNA, 19 nt, Artificial Sequence
  Synthetic
cagcccggagugcuggagg

SEQ ID NO: 393 - RNA, 19 nt, Artificial Sequence
  Synthetic
gcccccuagcccagacaga

SEQ ID NO: 394 - RNA, 19 nt, Artificial Sequence
  Synthetic
acaucucugcacccugggg

SEQ ID NO: 395 - RNA, 19 nt, Artificial Sequence
  Synthetic
gccuggaacagaacuggca

SEQ ID NO: 396 - RNA, 19 nt, Artificial Sequence
  Synthetic
aaagaggcaagaggucacu

SEQ ID NO: 397 - RNA, 19 nt, Artificial Sequence
  Synthetic
ugagggccucugucaccca

SEQ ID NO: 398 - RNA, 19 nt, Artificial Sequence
  Synthetic
aggaccugccuccugccug

SEQ ID NO: 399 - RNA, 19 nt, Artificial Sequence
  Synthetic
gccccucucccgccagacu

SEQ ID NO: 400 - RNA, 19 nt, Artificial Sequence
  Synthetic
uguuagaaaauggacacug

SEQ ID NO: 401 - RNA, 19 nt, Artificial Sequence
  Synthetic
gugcccagcccggaccuug

SEQ ID NO: 402 - RNA, 19 nt, Artificial Sequence
  Synthetic
ggcagcccaggccggggug

SEQ ID NO: 403 - RNA, 19 nt, Artificial Sequence
  Synthetic
ggagcaugggccuggccac

SEQ ID NO: 404 - RNA, 19 nt, Artificial Sequence
  Synthetic
ccucucuccuuugcugagg

SEQ ID NO: 405 - RNA, 19 nt, Artificial Sequence
  Synthetic
gccuccagcuucaggcagg

SEQ ID NO: 406 - RNA, 19 nt, Artificial Sequence
  Synthetic
gccaaggccuucuccuccc

SEQ ID NO: 407 - RNA, 19 nt, Artificial Sequence
  Synthetic
ccacccgcccuccccacgg

SEQ ID NO: 408 - RNA, 19 nt, Artificial Sequence
  Synthetic
gggccucgggaccucaggu

SEQ ID NO: 409 - RNA, 19 nt, Artificial Sequence
  Synthetic
uggccccaguucaaucucc

SEQ ID NO: 410 - RNA, 19 nt, Artificial Sequence
  Synthetic
ccgcugcugcugcugcgcc

SEQ ID NO: 411 - RNA, 19 nt, Artificial Sequence
  Synthetic
ccuuaccuuccccagcguc

SEQ ID NO: 412 - RNA, 19 nt, Artificial Sequence
  Synthetic
cccagucucuggcaguucu

SEQ ID NO: 413 - RNA, 19 nt, Artificial Sequence
  Synthetic
uggaauggaaggguucugg

SEQ ID NO: 414 - RNA, 19 nt, Artificial Sequence
  Synthetic
gcugccccaaccugcugaa

SEQ ID NO: 415 - RNA, 19 nt, Artificial Sequence
  Synthetic
agggcagagguggagggug

SEQ ID NO: 416 - RNA, 19 nt, Artificial Sequence
  Synthetic
ggggggcgcugaguaggga

SEQ ID NO: 417 - RNA, 19 nt, Artificial Sequence
  Synthetic
acucagggccaugccugcc

SEQ ID NO: 418 - RNA, 19 nt, Artificial Sequence
  Synthetic
cccccucaucucauucaaa

SEQ ID NO: 419 - RNA, 19 nt, Artificial Sequence
  Synthetic
accccacccuaguuucccu

SEQ ID NO: 420 - RNA, 19 nt, Artificial Sequence
  Synthetic
ugaaggaacauuccuuagu

SEQ ID NO: 421 - RNA, 19 nt, Artificial Sequence
  Synthetic
ucucaagggcuagcauccc

SEQ ID NO: 422 - RNA, 19 nt, Artificial Sequence
  Synthetic
cugaggagccaggccgggc

SEQ ID NO: 423 - RNA, 19 nt, Artificial Sequence
  Synthetic
ccgaauccccucccuguca

SEQ ID NO: 424 - RNA, 19 nt, Artificial Sequence
  Synthetic
aaagcugucacuucgcgug

SEQ ID NO: 425 - RNA, 19 nt, Artificial Sequence
  Synthetic
gcccucgcugcuucugugu

SEQ ID NO: 426 - RNA, 19 nt, Artificial Sequence
  Synthetic
uguggugagcagaagugga

SEQ ID NO: 427 - RNA, 19 nt, Artificial Sequence
  Synthetic
agcuggggggcguggagag

SEQ ID NO: 428 - RNA, 19 nt, Artificial Sequence
  Synthetic
gcccggcgccccugccacc

SEQ ID NO: 429 - RNA, 19 nt, Artificial Sequence
  Synthetic
cucccugacccgucuaaua

SEQ ID NO: 430 - RNA, 19 nt, Artificial Sequence
  Synthetic
auauaaauauagagaugug

SEQ ID NO: 431 - RNA, 19 nt, Artificial Sequence
  Synthetic
auagagaugugucuauggc

SEQ ID NO: 432 - RNA, 19 nt, Artificial Sequence
  Synthetic
ggccccgcccgaggccccg

SEQ ID NO: 433 - RNA, 19 nt, Artificial Sequence
  Synthetic
cgcccuccuccccacggcg

SEQ ID NO: 434 - RNA, 19 nt, Artificial Sequence
  Synthetic
ccacuccuccccucccacc

SEQ ID NO: 435 - RNA, 19 nt, Artificial Sequence
  Synthetic
ccgccgccgccgccaucuc

SEQ ID NO: 436 - RNA, 19 nt, Artificial Sequence
  Synthetic
cgcccccgccccccugagc

SEQ ID NO: 437 - RNA, 19 nt, Artificial Sequence
  Synthetic
cgguucuacggggcucccc

SEQ ID NO: 438 - RNA, 19 nt, Artificial Sequence
  Synthetic
cccccgggccgacccccuc

SEQ ID NO: 439 - RNA, 19 nt, Artificial Sequence
  Synthetic
ucuccaccucccccgggac

SEQ ID NO: 440 - RNA, 19 nt, Artificial Sequence
  Synthetic
acggcugccccuucaccau

SEQ ID NO: 441 - RNA, 19 nt, Artificial Sequence
  Synthetic
agcgcgggcccacgucgaa

SEQ ID NO: 442 - RNA, 19 nt, Artificial Sequence
  Synthetic
uguacugcaacugcgugua

SEQ ID NO: 443 - RNA, 19 nt, Artificial Sequence
  Synthetic
cguacgcgcccucgccgau

SEQ ID NO: 444 - RNA, 19 nt, Artificial Sequence
  Synthetic
aggccgagcugaccaugcc

SEQ ID NO: 445 - RNA, 19 nt, Artificial Sequence
  Synthetic
ucuugcgcacguggucaua

SEQ ID NO: 446 - RNA, 19 nt, Artificial Sequence
  Synthetic
ucuugauggccacgcgagu

SEQ ID NO: 447 - RNA, 19 nt, Artificial Sequence
  Synthetic
guucgaaggggcugaucuu

SEQ ID NO: 448 - RNA, 19 nt, Artificial Sequence
  Synthetic
gcuggcaguaggucugaug

SEQ ID NO: 449 - RNA, 19 nt, Artificial Sequence
  Synthetic
ggaucucccggagcgugcg

SEQ ID NO: 450 - RNA, 19 nt, Artificial Sequence
  Synthetic
ggaagcgcagcaggaucug

SEQ ID NO: 451 - RNA, 19 nt, Artificial Sequence
  Synthetic
cgaugacauucucauggcg

SEQ ID NO: 452 - RNA, 19 nt, Artificial Sequence
  Synthetic
gcagaaugucucggaugcc

SEQ ID NO: 453 - RNA, 19 nt, Artificial Sequence
  Synthetic
cuuccaggguggacgcccg

SEQ ID NO: 454 - RNA, 19 nt, Artificial Sequence
  Synthetic
uguagacaucucucauggc

SEQ ID NO: 455 - RNA, 19 nt, Artificial Sequence
  Synthetic
ccaucagguccugcacaau

SEQ ID NO: 456 - RNA, 19 nt, Artificial Sequence
  Synthetic
acuuguacaggucagucuc

SEQ ID NO: 457 - RNA, 19 nt, Artificial Sequence
  Synthetic
gcugcuggcuuuucagcaa

SEQ ID NO: 458 - RNA, 19 nt, Artificial Sequence
  Synthetic
agauauggucauugcucag

SEQ ID NO: 459 - RNA, 19 nt, Artificial Sequence
  Synthetic
ucugguagaggaaguagca

SEQ ID NO: 460 - RNA, 19 nt, Artificial Sequence
  Synthetic
acuugaggccccgcaggau

SEQ ID NO: 461 - RNA, 19 nt, Artificial Sequence
  Synthetic
cguuggcggaguggaugua

SEQ ID NO: 462 - RNA, 19 nt, Artificial Sequence
  Synthetic
uuagaucucgguggagcac

SEQ ID NO: 463 - RNA, 19 nt, Artificial Sequence
  Synthetic
ugagcagguuggagggcuu

SEQ ID NO: 464 - RNA, 19 nt, Artificial Sequence
  Synthetic
ggucgcaggugguguugau

SEQ ID NO: 465 - RNA, 19 nt, Artificial Sequence
  Synthetic
cgaaaucacaaaucuuaag

SEQ ID NO: 466 - RNA, 19 nt, Artificial Sequence
  Synthetic
cggcaauccgggccaggcc

SEQ ID NO: 467 - RNA, 19 nt, Artificial Sequence
  Synthetic
uguggucaugcucaggauc

SEQ ID NO: 468 - RNA, 19 nt, Artificial Sequence
  Synthetic
acuccgucaggaagccggu

SEQ ID NO: 469 - RNA, 19 nt, Artificial Sequence
  Synthetic
accagcgcguagccacaua

SEQ ID NO: 470 - RNA, 19 nt, Artificial Sequence
  Synthetic
ugaucucuggggcccggua

SEQ ID NO: 471 - RNA, 19 nt, Artificial Sequence
  Synthetic
agcccuuggaguucagcau

SEQ ID NO: 472 - RNA, 19 nt, Artificial Sequence
  Synthetic
ugucgauggacuugguaua

SEQ ID NO: 473 - RNA, 19 nt, Artificial Sequence
  Synthetic
ugcagcccacagaccagau

SEQ ID NO: 474 - RNA, 19 nt, Artificial Sequence
  Synthetic
agagcaucucagccagaau

SEQ ID NO: 475 - RNA, 19 nt, Artificial Sequence
  Synthetic
ggaagaugggccgguuaga

SEQ ID NO: 476 - RNA, 19 nt, Artificial Sequence
  Synthetic
ccagguagugcuugccagg

SEQ ID NO: 477 - RNA, 19 nt, Artificial Sequence
  Synthetic
gaaugugguugagcugauc

SEQ ID NO: 478 - RNA, 19 nt, Artificial Sequence
  Synthetic
gggagcccaggaugcccag

SEQ ID NO: 479 - RNA, 19 nt, Artificial Sequence
  Synthetic
ucagguccuccugggaugg

SEQ ID NO: 480 - RNA, 19 nt, Artificial Sequence
  Synthetic
ucauguugaugauacaauu

SEQ ID NO: 481 - RNA, 19 nt, Artificial Sequence
  Synthetic
guagguaguuucgggccuu

SEQ ID NO: 482 - RNA, 19 nt, Artificial Sequence
  Synthetic
ucuuggagggcagagacug

SEQ ID NO: 483 - RNA, 19 nt, Artificial Sequence
  Synthetic
uggcccaagccaccuuggu

SEQ ID NO: 484 - RNA, 19 nt, Artificial Sequence
  Synthetic
cugacuuggggaaaagcuu

SEQ ID NO: 485 - RNA, 19 nt, Artificial Sequence
  Synthetic
ggucaagggcuuuggaguc

SEQ ID NO: 486 - RNA, 19 nt, Artificial Sequence
  Synthetic
uuaacauccgguccagcag

SEQ ID NO: 487 - RNA, 19 nt, Artificial Sequence
  Synthetic
guuuauugggguuaaaggu

SEQ ID NO: 488 - RNA, 19 nt, Artificial Sequence
  Synthetic
cuuccuccacugugauccg

SEQ ID NO: 489 - RNA, 19 nt, Artificial Sequence
  Synthetic
gguaggggugagccagcgc

SEQ ID NO: 490 - RNA, 19 nt, Artificial Sequence
  Synthetic
ggucauaguacugcuccag

SEQ ID NO: 491 - RNA, 19 nt, Artificial Sequence
  Synthetic
ccacuggcucauccgucgg

SEQ ID NO: 492 - RNA, 19 nt, Artificial Sequence
  Synthetic
aggugaagggcuccucggc

SEQ ID NO: 493 - RNA, 19 nt, Artificial Sequence
  Synthetic
cauccagcuccauggcgaa

SEQ ID NO: 494 - RNA, 19 nt, Artificial Sequence
  Synthetic
gccgcuccuuagguagguc

SEQ ID NO: 495 - RNA, 19 nt, Artificial Sequence
  Synthetic
ggaagaugagcuccuucag

SEQ ID NO: 496 - RNA, 19 nt, Artificial Sequence
  Synthetic
ggaagcgugcugucuccug

SEQ ID NO: 497 - RNA, 19 nt, Artificial Sequence
  Synthetic
ccuccagcacuccgggcug

SEQ ID NO: 498 - RNA, 19 nt, Artificial Sequence
  Synthetic
ucugucugggcuagggggc

SEQ ID NO: 499 - RNA, 19 nt, Artificial Sequence
  Synthetic
ccccagggugcagagaugu

SEQ ID NO: 500 - RNA, 19 nt, Artificial Sequence
  Synthetic
ugccaguucuguuccaggc

SEQ ID NO: 501 - RNA, 19 nt, Artificial Sequence
  Synthetic
agugaccucuugccucuuu

SEQ ID NO: 502 - RNA, 19 nt, Artificial Sequence
  Synthetic
ugggugacagaggcccuca

SEQ ID NO: 503 - RNA, 19 nt, Artificial Sequence
  Synthetic
caggcaggaggcagguccu

SEQ ID NO: 504 - RNA, 19 nt, Artificial Sequence
  Synthetic
agucuggcgggagaggggc

SEQ ID NO: 505 - RNA, 19 nt, Artificial Sequence
  Synthetic
caguguccauuuucuaaca

SEQ ID NO: 506 - RNA, 19 nt, Artificial Sequence
  Synthetic
caagguccgggcugggcac

SEQ ID NO: 507 - RNA, 19 nt, Artificial Sequence
  Synthetic
caccccggccugggcugcc

SEQ ID NO: 508 - RNA, 19 nt, Artificial Sequence
  Synthetic
guggccaggcccaugcucc

SEQ ID NO: 509 - RNA, 19 nt, Artificial Sequence
  Synthetic
ccucagcaaaggagagagg

SEQ ID NO: 510 - RNA, 19 nt, Artificial Sequence
  Synthetic
ccugccugaagcuggaggc

SEQ ID NO: 511 - RNA, 19 nt, Artificial Sequence
  Synthetic
gggaggagaaggccuuggc

SEQ ID NO: 512 - RNA, 19 nt, Artificial Sequence
  Synthetic
ccguggggagggcgggugg

SEQ ID NO: 513 - RNA, 19 nt, Artificial Sequence
  Synthetic
accugaggucccgaggccc

SEQ ID NO: 514 - RNA, 19 nt, Artificial Sequence
  Synthetic
ggagauugaacuggggcca

SEQ ID NO: 515 - RNA, 19 nt, Artificial Sequence
  Synthetic
ggcgcagcagcagcagcgg

SEQ ID NO: 516 - RNA, 19 nt, Artificial Sequence
  Synthetic
gacgcuggggaagguaagg

SEQ ID NO: 517 - RNA, 19 nt, Artificial Sequence
  Synthetic
agaacugccagagacuggg

SEQ ID NO: 518 - RNA, 19 nt, Artificial Sequence
  Synthetic
ccagaacccuuccauucca

SEQ ID NO: 519 - RNA, 19 nt, Artificial Sequence
  Synthetic
uucagcagguuggggcagc

SEQ ID NO: 520 - RNA, 19 nt, Artificial Sequence
  Synthetic
cacccuccaccucugcccu

SEQ ID NO: 521 - RNA, 19 nt, Artificial Sequence
  Synthetic
ucccuacucagcgcccccc

SEQ ID NO: 522 - RNA, 19 nt, Artificial Sequence
  Synthetic
ggcaggcauggcccugagu

SEQ ID NO: 523 - RNA, 19 nt, Artificial Sequence
  Synthetic
uuugaaugagaugaggggg

SEQ ID NO: 524 - RNA, 19 nt, Artificial Sequence
  Synthetic
agggaaacuaggguggggu

SEQ ID NO: 525 - RNA, 19 nt, Artificial Sequence
  Synthetic
acuaaggaauguuccuuca

SEQ ID NO: 526 - RNA, 19 nt, Artificial Sequence
  Synthetic
gggaugcuagcccuugaga

SEQ ID NO: 527 - RNA, 19 nt, Artificial Sequence
  Synthetic
gcccggccuggcuccucag

SEQ ID NO: 528 - RNA, 19 nt, Artificial Sequence
  Synthetic
ugacagggaggggauucgg

SEQ ID NO: 529 - RNA, 19 nt, Artificial Sequence
  Synthetic
cacgcgaagugacagcuuu

SEQ ID NO: 530 - RNA, 19 nt, Artificial Sequence
  Synthetic
acacagaagcagcgagggc

SEQ ID NO: 531 - RNA, 19 nt, Artificial Sequence
  Synthetic
uccacuucugcucaccaca

SEQ ID NO: 532 - RNA, 19 nt, Artificial Sequence
  Synthetic
cucuccacgccccccagcu

SEQ ID NO: 533 - RNA, 19 nt, Artificial Sequence
  Synthetic
gguggcaggggcgccgggc

SEQ ID NO: 534 - RNA, 19 nt, Artificial Sequence
  Synthetic
uauuagacgggucagggag

SEQ ID NO: 535 - RNA, 19 nt, Artificial Sequence
  Synthetic
cacaucucuauauuuauau

SEQ ID NO: 536 - RNA, 19 nt, Artificial Sequence
  Synthetic
gccauagacacaucucuau

SEQ ID NO: 537 - RNA, 19 nt, Artificial Sequence
  Synthetic
uaauugcuugccaucauga

SEQ ID NO: 538 - RNA, 19 nt, Artificial Sequence
  Synthetic
agcagaagcaagcgugaca

SEQ ID NO: 539 - RNA, 19 nt, Artificial Sequence
  Synthetic
aacaauuuuuauaguguag

SEQ ID NO: 540 - RNA, 19 nt, Artificial Sequence
  Synthetic
gagauuggagauucuacau

SEQ ID NO: 541 - RNA, 19 nt, Artificial Sequence
  Synthetic
uucacaguccugaaacgau

SEQ ID NO: 542 - RNA, 19 nt, Artificial Sequence
  Synthetic
uaucagaauuuaaaaccua

SEQ ID NO: 543 - RNA, 19 nt, Artificial Sequence
  Synthetic
auaggcucaggagcucaag

SEQ ID NO: 544 - RNA, 19 nt, Artificial Sequence
  Synthetic
ggaauaguaugcgcagcuu

SEQ ID NO: 545 - RNA, 19 nt, Artificial Sequence
  Synthetic
uaugaugccauucuugaaa

SEQ ID NO: 546 - RNA, 19 nt, Artificial Sequence
  Synthetic
agaaauguugcaaucaaga

SEQ ID NO: 547 - RNA, 19 nt, Artificial Sequence
  Synthetic
aagcuaagccgaccauuuc

SEQ ID NO: 548 - RNA, 19 nt, Artificial Sequence
  Synthetic
cagaaucagacucaugcca

SEQ ID NO: 549 - RNA, 19 nt, Artificial Sequence
  Synthetic
aagcgggccuacagagagc

SEQ ID NO: 550 - RNA, 19 nt, Artificial Sequence
  Synthetic
cuaguucuuaugaaaugug

SEQ ID NO: 551 - RNA, 19 nt, Artificial Sequence
  Synthetic
guuaaucacaaaaauauaa

SEQ ID NO: 552 - RNA, 19 nt, Artificial Sequence
  Synthetic
auuggccuuuugaauguuu

SEQ ID NO: 553 - RNA, 19 nt, Artificial Sequence
  Synthetic
uucacaccacagaaauccc

SEQ ID NO: 554 - RNA, 19 nt, Artificial Sequence
  Synthetic
cuagaagaauuucaagaug

SEQ ID NO: 555 - RNA, 19 nt, Artificial Sequence
  Synthetic
guuuacauagucauggagc

SEQ ID NO: 556 - RNA, 19 nt, Artificial Sequence
  Synthetic
cucauggaugcaaaucuuu

SEQ ID NO: 557 - RNA, 19 nt, Artificial Sequence
  Synthetic
ugccaagugauucagaugg

SEQ ID NO: 558 - RNA, 19 nt, Artificial Sequence
  Synthetic
gagcuagaucaugaaagaa

SEQ ID NO: 559 - RNA, 19 nt, Artificial Sequence
  Synthetic
auguccuaccuucucuauc

SEQ ID NO: 560 - RNA, 19 nt, Artificial Sequence
  Synthetic
cagaugcuguguggaauca

SEQ ID NO: 561 - RNA, 19 nt, Artificial Sequence
  Synthetic
aagcaccuucauucugcug

SEQ ID NO: 562 - RNA, 19 nt, Artificial Sequence
  Synthetic
ggaauuauucaucgggacu

SEQ ID NO: 563 - RNA, 19 nt, Artificial Sequence
  Synthetic
uuaaagcccaguaauauag

SEQ ID NO: 564 - RNA, 19 nt, Artificial Sequence
  Synthetic
guaguaaaaucugauugca

SEQ ID NO: 565 - RNA, 19 nt, Artificial Sequence
  Synthetic
acuuugaagauucuugacu

SEQ ID NO: 566 - RNA, 19 nt, Artificial Sequence
  Synthetic
uucggucuggccaggacug

SEQ ID NO: 567 - RNA, 19 nt, Artificial Sequence
  Synthetic
gcaggaacgaguuuuauga

SEQ ID NO: 568 - RNA, 19 nt, Artificial Sequence
  Synthetic
augacgccuuauguaguga

SEQ ID NO: 569 - RNA, 19 nt, Artificial Sequence
  Synthetic
acucgcuacuacagagcac

SEQ ID NO: 570 - RNA, 19 nt, Artificial Sequence
  Synthetic
cccgaggucauccuuggca

SEQ ID NO: 571 - RNA, 19 nt, Artificial Sequence
  Synthetic
augggcuacaaggaaaacg

SEQ ID NO: 572 - RNA, 19 nt, Artificial Sequence
  Synthetic
guggauuuauggucugugg

SEQ ID NO: 573 - RNA, 19 nt, Artificial Sequence
  Synthetic
gggugcauuaugggagaaa

SEQ ID NO: 574 - RNA, 19 nt, Artificial Sequence
  Synthetic
augguuugccacaaaaucc

SEQ ID NO: 575 - RNA, 19 nt, Artificial Sequence
  Synthetic
cucuuuccaggaagggacu

SEQ ID NO: 576 - RNA, 19 nt, Artificial Sequence
  Synthetic
uauauugaucaguggaaua

SEQ ID NO: 577 - RNA, 19 nt, Artificial Sequence
  Synthetic
aaaguuauugaacagcuug

SEQ ID NO: 578 - RNA, 19 nt, Artificial Sequence
  Synthetic
ggaacaccauguccugaau

SEQ ID NO: 579 - RNA, 19 nt, Artificial Sequence
  Synthetic
uucaugaagaaacugcaac

SEQ ID NO: 580 - RNA, 19 nt, Artificial Sequence
  Synthetic
ccaacaguaaggacuuacg

SEQ ID NO: 581 - RNA, 19 nt, Artificial Sequence
  Synthetic
guugaaaacagaccuaaau

SEQ ID NO: 582 - RNA, 19 nt, Artificial Sequence
  Synthetic
uaugcuggauauagcuuug

SEQ ID NO: 583 - RNA, 19 nt, Artificial Sequence
  Synthetic
gagaaacucuucccugaug

SEQ ID NO: 584 - RNA, 19 nt, Artificial Sequence
  Synthetic
guccuuuucccagcugacu

SEQ ID NO: 585 - RNA, 19 nt, Artificial Sequence
  Synthetic
ucagaacacaacaaacuua

SEQ ID NO: 586 - RNA, 19 nt, Artificial Sequence
  Synthetic
aaagccagucaggcaaggg

SEQ ID NO: 587 - RNA, 19 nt, Artificial Sequence
  Synthetic
gauuuguuauccaaaaugc

SEQ ID NO: 588 - RNA, 19 nt, Artificial Sequence
  Synthetic
cugguaauagaugcaucua

SEQ ID NO: 589 - RNA, 19 nt, Artificial Sequence
  Synthetic
aaaaggaucucuguagaug

SEQ ID NO: 590 - RNA, 19 nt, Artificial Sequence
  Synthetic
gaagcucuccaacacccgu

SEQ ID NO: 591 - RNA, 19 nt, Artificial Sequence
  Synthetic
uacaucaaugucugguaug

SEQ ID NO: 592 - RNA, 19 nt, Artificial Sequence
  Synthetic
gauccuucugaagcagaag

SEQ ID NO: 593 - RNA, 19 nt, Artificial Sequence
  Synthetic
gcuccaccaccaaagaucc

SEQ ID NO: 594 - RNA, 19 nt, Artificial Sequence
  Synthetic
ccugacaagcaguuagaug

SEQ ID NO: 595 - RNA, 19 nt, Artificial Sequence
  Synthetic
gaaagggaacacacaauag

SEQ ID NO: 596 - RNA, 19 nt, Artificial Sequence
  Synthetic
gaagaguggaaagaauuga

SEQ ID NO: 597 - RNA, 19 nt, Artificial Sequence
  Synthetic
auauauaaggaaguuaugg

SEQ ID NO: 598 - RNA, 19 nt, Artificial Sequence
  Synthetic
gacuuggaggagagaacca

SEQ ID NO: 599 - RNA, 19 nt, Artificial Sequence
  Synthetic
aagaauggaguuauacggg

SEQ ID NO: 600 - RNA, 19 nt, Artificial Sequence
  Synthetic
gggcagcccucuccuuuag

SEQ ID NO: 601 - RNA, 19 nt, Artificial Sequence
  Synthetic
gcacaggugcagcagugau

SEQ ID NO: 602 - RNA, 19 nt, Artificial Sequence
  Synthetic
ucaauggcucucagcaucc

SEQ ID NO: 603 - RNA, 19 nt, Artificial Sequence
  Synthetic
caucaucaucgucgucugu

SEQ ID NO: 604 - RNA, 19 nt, Artificial Sequence
  Synthetic
ucaaugaugugucuucaau

SEQ ID NO: 605 - RNA, 19 nt, Artificial Sequence
  Synthetic
ugucaacagauccgacuuu

SEQ ID NO: 606 - RNA, 19 nt, Artificial Sequence
  Synthetic
uggccucugauacagacag

SEQ ID NO: 607 - RNA, 19 nt, Artificial Sequence
  Synthetic
gcagucuagaagcagcagc

SEQ ID NO: 608 - RNA, 19 nt, Artificial Sequence
  Synthetic
cugggccucugggcugcug

SEQ ID NO: 609 - RNA, 19 nt, Artificial Sequence
  Synthetic
guagaugacuacuugggcc

SEQ ID NO: 610 - RNA, 19 nt, Artificial Sequence
  Synthetic
caucggggggugggaggga

SEQ ID NO: 611 - RNA, 19 nt, Artificial Sequence
  Synthetic
auggggagucgguuaguca

SEQ ID NO: 612 - RNA, 19 nt, Artificial Sequence
  Synthetic
auugauagaacuacuuuga

SEQ ID NO: 613 - RNA, 19 nt, Artificial Sequence
  Synthetic
aaaacaauucaguggucuu

SEQ ID NO: 614 - RNA, 19 nt, Artificial Sequence
  Synthetic
uauuuuugggugauuuuuc

SEQ ID NO: 615 - RNA, 19 nt, Artificial Sequence
  Synthetic
ggugauuuuucaaaaaaug

SEQ ID NO: 616 - RNA, 19 nt, Artificial Sequence
  Synthetic
ucaugauggcaagcaauua

SEQ ID NO: 617 - RNA, 19 nt, Artificial Sequence
  Synthetic
ugucacgcuugcuucugcu

SEQ ID NO: 618 - RNA, 19 nt, Artificial Sequence
  Synthetic
cuacacuauaaaaauuguu

SEQ ID NO: 619 - RNA, 19 nt, Artificial Sequence
  Synthetic
auguagaaucuccaaucuc

SEQ ID NO: 620 - RNA, 19 nt, Artificial Sequence
  Synthetic
aucguuucaggacugugaa

SEQ ID NO: 621 - RNA, 19 nt, Artificial Sequence
  Synthetic
uagguuuuaaauucugaua

SEQ ID NO: 622 - RNA, 19 nt, Artificial Sequence
  Synthetic
cuugagcuccugagccuau

SEQ ID NO: 623 - RNA, 19 nt, Artificial Sequence
  Synthetic
aagcugcgcauacuauucc

SEQ ID NO: 624 - RNA, 19 nt, Artificial Sequence
  Synthetic
uuucaagaauggcaucaua

SEQ ID NO: 625 - RNA, 19 nt, Artificial Sequence
  Synthetic
ucuugauugcaacauuucu

SEQ ID NO: 626 - RNA, 19 nt, Artificial Sequence
  Synthetic
gaaauggucggcuuagcuu

SEQ ID NO: 627 - RNA, 19 nt, Artificial Sequence
  Synthetic
uggcaugagucugauucug

SEQ ID NO: 628 - RNA, 19 nt, Artificial Sequence
  Synthetic
gcucucuguaggcccgcuu

SEQ ID NO: 629 - RNA, 19 nt, Artificial Sequence
  Synthetic
cacauuucauaagaacuag

SEQ ID NO: 630 - RNA, 19 nt, Artificial Sequence
  Synthetic
uuauauuuuugugauuaac

SEQ ID NO: 631 - RNA, 19 nt, Artificial Sequence
  Synthetic
aaacauucaaaaggccaau

SEQ ID NO: 632 - RNA, 19 nt, Artificial Sequence
  Synthetic
gggauuucuguggugugaa

SEQ ID NO: 633 - RNA, 19 nt, Artificial Sequence
  Synthetic
caucuugaaauucuucuag

SEQ ID NO: 634 - RNA, 19 nt, Artificial Sequence
  Synthetic
gcuccaugacuauguaaac

SEQ ID NO: 635 - RNA, 19 nt, Artificial Sequence
  Synthetic
aaagauuugcauccaugag

SEQ ID NO: 636 - RNA, 19 nt, Artificial Sequence
  Synthetic
ccaucugaaucacuuggca

SEQ ID NO: 637 - RNA, 19 nt, Artificial Sequence
  Synthetic
uucuuucaugaucuagcuc

SEQ ID NO: 638 - RNA, 19 nt, Artificial Sequence
  Synthetic
gauagagaagguaggacau

SEQ ID NO: 639 - RNA, 19 nt, Artificial Sequence
  Synthetic
ugauuccacacagcaucug

SEQ ID NO: 640 - RNA, 19 nt, Artificial Sequence
  Synthetic
cagcagaaugaaggugcuu

SEQ ID NO: 641 - RNA, 19 nt, Artificial Sequence
  Synthetic
agucccgaugaauaauucc

SEQ ID NO: 642 - RNA, 19 nt, Artificial Sequence
  Synthetic
cuauauuacugggcuuuaa

SEQ ID NO: 643 - RNA, 19 nt, Artificial Sequence
  Synthetic
ugcaaucagauuuuacuac

SEQ ID NO: 644 - RNA, 19 nt, Artificial Sequence
  Synthetic
agucaagaaucuucaaagu

SEQ ID NO: 645 - RNA, 19 nt, Artificial Sequence
  Synthetic
caguccuggccagaccgaa

SEQ ID NO: 646 - RNA, 19 nt, Artificial Sequence
  Synthetic
ucauaaaacucguuccugc

SEQ ID NO: 647 - RNA, 19 nt, Artificial Sequence
  Synthetic
ucacuacauaaggcgucau

SEQ ID NO: 648 - RNA, 19 nt, Artificial Sequence
  Synthetic
gugcucuguaguagcgagu

SEQ ID NO: 649 - RNA, 19 nt, Artificial Sequence
  Synthetic
ugccaaggaugaccucggg

SEQ ID NO: 650 - RNA, 19 nt, Artificial Sequence
  Synthetic
cguuuuccuuguagcccau

SEQ ID NO: 651 - RNA, 19 nt, Artificial Sequence
  Synthetic
ccacagaccauaaauccac

SEQ ID NO: 652 - RNA, 19 nt, Artificial Sequence
  Synthetic
uuucucccauaaugcaccc

SEQ ID NO: 653 - RNA, 19 nt, Artificial Sequence
  Synthetic
ggauuuuguggcaaaccau

SEQ ID NO: 654 - RNA, 19 nt, Artificial Sequence
  Synthetic
agucccuuccuggaaagag

SEQ ID NO: 655 - RNA, 19 nt, Artificial Sequence
  Synthetic
uauuccacugaucaauaua

SEQ ID NO: 656 - RNA, 19 nt, Artificial Sequence
  Synthetic
caagcuguucaauaacuuu

SEQ ID NO: 657 - RNA, 19 nt, Artificial Sequence
  Synthetic
auucaggacaugguguucc

SEQ ID NO: 658 - RNA, 19 nt, Artificial Sequence
  Synthetic
guugcaguuucuucaugaa

SEQ ID NO: 659 - RNA, 19 nt, Artificial Sequence
  Synthetic
cguaaguccuuacuguugg

SEQ ID NO: 660 - RNA, 19 nt, Artificial Sequence
  Synthetic
auuuaggucuguuuucaac

SEQ ID NO: 661 - RNA, 19 nt, Artificial Sequence
  Synthetic
caaagcuauauccagcaua

SEQ ID NO: 662 - RNA, 19 nt, Artificial Sequence
  Synthetic
caucagggaagaguuucuc

SEQ ID NO: 663 - RNA, 19 nt, Artificial Sequence
  Synthetic
agucagcugggaaaaggac

SEQ ID NO: 664 - RNA, 19 nt, Artificial Sequence
  Synthetic
uaaguuuguuguguucuga

SEQ ID NO: 665 - RNA, 19 nt, Artificial Sequence
  Synthetic
cccuugccugacuggcuuu

SEQ ID NO: 666 - RNA, 19 nt, Artificial Sequence
  Synthetic
gcauuuuggauaacaaauc

SEQ ID NO: 667 - RNA, 19 nt, Artificial Sequence
  Synthetic
uagaugcaucuauuaccag

SEQ ID NO: 668 - RNA, 19 nt, Artificial Sequence
  Synthetic
caucuacagagauccuuuu

SEQ ID NO: 669 - RNA, 19 nt, Artificial Sequence
  Synthetic
acggguguuggagagcuuc

SEQ ID NO: 670 - RNA, 19 nt, Artificial Sequence
  Synthetic
cauaccagacauugaugua

SEQ ID NO: 671 - RNA, 19 nt, Artificial Sequence
  Synthetic
cuucugcuucagaaggauc

SEQ ID NO: 672 - RNA, 19 nt, Artificial Sequence
  Synthetic
ggaucuuuggugguggagc

SEQ ID NO: 673 - RNA, 19 nt, Artificial Sequence
  Synthetic
caucuaacugcuugucagg

SEQ ID NO: 674 - RNA, 19 nt, Artificial Sequence
  Synthetic
cuauuguguguucccuuuc

SEQ ID NO: 675 - RNA, 19 nt, Artificial Sequence
  Synthetic
ucaauucuuuccacucuuc

SEQ ID NO: 676 - RNA, 19 nt, Artificial Sequence
  Synthetic
ccauaacuuccuuauauau

SEQ ID NO: 677 - RNA, 19 nt, Artificial Sequence
  Synthetic
ugguucucuccuccaaguc

SEQ ID NO: 678 - RNA, 19 nt, Artificial Sequence
  Synthetic
cccguauaacuccauucuu

SEQ ID NO: 679 - RNA, 19 nt, Artificial Sequence
  Synthetic
cuaaaggagagggcugccc

SEQ ID NO: 680 - RNA, 19 nt, Artificial Sequence
  Synthetic
aucacugcugcaccugugc

SEQ ID NO: 681 - RNA, 19 nt, Artificial Sequence
  Synthetic
ggaugcugagagccauuga

SEQ ID NO: 682 - RNA, 19 nt, Artificial Sequence
  Synthetic
acagacgacgaugaugaug

SEQ ID NO: 683 - RNA, 19 nt, Artificial Sequence
  Synthetic
auugaagacacaucauuga

SEQ ID NO: 684 - RNA, 19 nt, Artificial Sequence
  Synthetic
aaagucggaucuguugaca

SEQ ID NO: 685 - RNA, 19 nt, Artificial Sequence
  Synthetic
cugucuguaucagaggcca

SEQ ID NO: 686 - RNA, 19 nt, Artificial Sequence
  Synthetic
gcugcugcuucuagacugc

SEQ ID NO: 687 - RNA, 19 nt, Artificial Sequence
  Synthetic
cagcagcccagaggcccag

SEQ ID NO: 688 - RNA, 19 nt, Artificial Sequence
  Synthetic
ggcccaaguagucaucuac

SEQ ID NO: 689 - RNA, 19 nt, Artificial Sequence
  Synthetic
ucccucccaccccccgaug

SEQ ID NO: 690 - RNA, 19 nt, Artificial Sequence
  Synthetic
ugacuaaccgacuccccau

SEQ ID NO: 691 - RNA, 19 nt, Artificial Sequence
  Synthetic
ucaaaguaguucuaucaau

SEQ ID NO: 692 - RNA, 19 nt, Artificial Sequence
  Synthetic
aagaccacugaauuguuuu

SEQ ID NO: 693 - RNA, 19 nt, Artificial Sequence
  Synthetic
gaaaaaucacccaaaaaua

SEQ ID NO: 694 - RNA, 19 nt, Artificial Sequence
  Synthetic
cauuuuuugaaaaaucacc

SEQ ID NO: 695 - RNA, 19 nt, Artificial Sequence
  Synthetic
aaccgcgaccacuggagcc

SEQ ID NO: 696 - RNA, 19 nt, Artificial Sequence
  Synthetic
cuuagcgggcgcagcagcu

SEQ ID NO: 697 - RNA, 19 nt, Artificial Sequence
  Synthetic
uggaacgggaguacugcga

SEQ ID NO: 698 - RNA, 19 nt, Artificial Sequence
  Synthetic
acgcagcccggagucggcc

SEQ ID NO: 699 - RNA, 19 nt, Artificial Sequence
  Synthetic
cuuguaggggcgaaggugc

SEQ ID NO: 700 - RNA, 19 nt, Artificial Sequence
  Synthetic
cagggagaucgcggcgggc

SEQ ID NO: 701 - RNA, 19 nt, Artificial Sequence
  Synthetic
cgcagucuugagcgccgga

SEQ ID NO: 702 - RNA, 19 nt, Artificial Sequence
  Synthetic
agcgcgucccugcccuuag

SEQ ID NO: 703 - RNA, 19 nt, Artificial Sequence
  Synthetic
gcggggcuugccccagucg

SEQ ID NO: 704 - RNA, 19 nt, Artificial Sequence
  Synthetic
gcaggggcacauccagccg

SEQ ID NO: 705 - RNA, 19 nt, Artificial Sequence
  Synthetic
gcugcggcugacagcagcc

SEQ ID NO: 706 - RNA, 19 nt, Artificial Sequence
  Synthetic
cgcgcgcgcgggagucugc

SEQ ID NO: 707 - RNA, 19 nt, Artificial Sequence
  Synthetic
cggggucgcggcagccgca

SEQ ID NO: 708 - RNA, 19 nt, Artificial Sequence
  Synthetic
accugcgcgggcgaccagc

SEQ ID NO: 709 - RNA, 19 nt, Artificial Sequence
  Synthetic
cgcaagguccccgcccggc

SEQ ID NO: 710 - RNA, 19 nt, Artificial Sequence
  Synthetic
cugggcgggcagcaagggc

SEQ ID NO: 711 - RNA, 19 nt, Artificial Sequence
  Synthetic
ccggggagagggugcgggu

SEQ ID NO: 712 - RNA, 19 nt, Artificial Sequence
  Synthetic
ugcaggcgggggccccaca

SEQ ID NO: 713 - RNA, 19 nt, Artificial Sequence
  Synthetic
agggccaccuucuugcccg

SEQ ID NO: 714 - RNA, 19 nt, Artificial Sequence
  Synthetic
ggcggcugccgcuggaaaa

SEQ ID NO: 715 - RNA, 19 nt, Artificial Sequence
  Synthetic
augucucaggagaggccca

SEQ ID NO: 716 - RNA, 19 nt, Artificial Sequence
  Synthetic
acguucuaccggcaggagc

SEQ ID NO: 717 - RNA, 19 nt, Artificial Sequence
  Synthetic
cugaacaagacaaucuggg

SEQ ID NO: 718 - RNA, 19 nt, Artificial Sequence
  Synthetic
gaggugcccgagcguuacc

SEQ ID NO: 719 - RNA, 19 nt, Artificial Sequence
  Synthetic
cagaaccugucuccagugg

SEQ ID NO: 720 - RNA, 19 nt, Artificial Sequence
  Synthetic
ggcucuggcgccuauggcu

SEQ ID NO: 721 - RNA, 19 nt, Artificial Sequence
  Synthetic
ucugugugugcugcuuuug

SEQ ID NO: 722 - RNA, 19 nt, Artificial Sequence
  Synthetic
gacacaaaaacgggguuac

SEQ ID NO: 723 - RNA, 19 nt, Artificial Sequence
  Synthetic
cguguggcagugaagaagc

SEQ ID NO: 724 - RNA, 19 nt, Artificial Sequence
  Synthetic
cucuccagaccauuucagu

SEQ ID NO: 725 - RNA, 19 nt, Artificial Sequence
  Synthetic
uccaucauucaugcgaaaa

SEQ ID NO: 726 - RNA, 19 nt, Artificial Sequence
  Synthetic
agaaccuacagagaacugc

SEQ ID NO: 727 - RNA, 19 nt, Artificial Sequence
  Synthetic
cgguuacuuaaacauauga

SEQ ID NO: 728 - RNA, 19 nt, Artificial Sequence
  Synthetic
aaacaugaaaaugugauug

SEQ ID NO: 729 - RNA, 19 nt, Artificial Sequence
  Synthetic
ggucuguuggacguuuuua

SEQ ID NO: 730 - RNA, 19 nt, Artificial Sequence
  Synthetic
acaccugcaaggucucugg

SEQ ID NO: 731 - RNA, 19 nt, Artificial Sequence
  Synthetic
gaggaauucaaugaugugu

SEQ ID NO: 732 - RNA, 19 nt, Artificial Sequence
  Synthetic
uaucuggugacccaucuca

SEQ ID NO: 733 - RNA, 19 nt, Artificial Sequence
  Synthetic
augggggcagaucugaaca

SEQ ID NO: 734 - RNA, 19 nt, Artificial Sequence
  Synthetic
aacauugugaaaugucaga

SEQ ID NO: 735 - RNA, 19 nt, Artificial Sequence
  Synthetic
aagcuuacagaugaccaug

SEQ ID NO: 736 - RNA, 19 nt, Artificial Sequence
  Synthetic
guucaguuccuuaucuacc

SEQ ID NO: 737 - RNA, 19 nt, Artificial Sequence
  Synthetic
caaauucuccgaggucuaa

SEQ ID NO: 738 - RNA, 19 nt, Artificial Sequence
  Synthetic
aaguauauacauucagcug

SEQ ID NO: 739 - RNA, 19 nt, Artificial Sequence
  Synthetic
gacauaauucacagggacc

SEQ ID NO: 740 - RNA, 19 nt, Artificial Sequence
  Synthetic
cuaaaaccuaguaaucuag

SEQ ID NO: 741 - RNA, 19 nt, Artificial Sequence
  Synthetic
gcugugaaugaagacugug

SEQ ID NO: 742 - RNA, 19 nt, Artificial Sequence
  Synthetic
gagcugaagauucuggauu

SEQ ID NO: 743 - RNA, 19 nt, Artificial Sequence
  Synthetic
uuuggacuggcucggcaca

SEQ ID NO: 744 - RNA, 19 nt, Artificial Sequence
  Synthetic
acagaugaugaaaugacag

SEQ ID NO: 745 - RNA, 19 nt, Artificial Sequence
  Synthetic
ggcuacguggccacuaggu

SEQ ID NO: 746 - RNA, 19 nt, Artificial Sequence
  Synthetic
ugguacagggcuccugaga

SEQ ID NO: 747 - RNA, 19 nt, Artificial Sequence
  Synthetic
aucaugcugaacuggaugc

SEQ ID NO: 748 - RNA, 19 nt, Artificial Sequence
  Synthetic
cauuacaaccagacaguug

SEQ ID NO: 749 - RNA, 19 nt, Artificial Sequence
  Synthetic
gauauuuggucagugggau

SEQ ID NO: 750 - RNA, 19 nt, Artificial Sequence
  Synthetic
ugcauaauggccgagcugu

SEQ ID NO: 751 - RNA, 19 nt, Artificial Sequence
  Synthetic
uugacuggaagaacauugu

SEQ ID NO: 752 - RNA, 19 nt, Artificial Sequence
  Synthetic
uuuccugguacagaccaua

SEQ ID NO: 753 - RNA, 19 nt, Artificial Sequence
  Synthetic
auugaucaguugaagcuca

SEQ ID NO: 754 - RNA, 19 nt, Artificial Sequence
  Synthetic
auuuuaagacucguuggaa

SEQ ID NO: 755 - RNA, 19 nt, Artificial Sequence
  Synthetic
accccaggggcugagcuuu

SEQ ID NO: 756 - RNA, 19 nt, Artificial Sequence
  Synthetic
uugaagaaaaucuccucag

SEQ ID NO: 757 - RNA, 19 nt, Artificial Sequence
  Synthetic
gagucugcaagaaacuaua

SEQ ID NO: 758 - RNA, 19 nt, Artificial Sequence
  Synthetic
auucagucuuugacucaga

SEQ ID NO: 759 - RNA, 19 nt, Artificial Sequence
  Synthetic
augccgaagaugaacuuug

SEQ ID NO: 760 - RNA, 19 nt, Artificial Sequence
  Synthetic
gcgaauguauuuauuggug

SEQ ID NO: 761 - RNA, 19 nt, Artificial Sequence
  Synthetic
gccaauccccuggcugucg

SEQ ID NO: 762 - RNA, 19 nt, Artificial Sequence
  Synthetic
gacuugcuggagaagaugc

SEQ ID NO: 763 - RNA, 19 nt, Artificial Sequence
  Synthetic
cuuguauuggacucagaua

SEQ ID NO: 764 - RNA, 19 nt, Artificial Sequence
  Synthetic
aagagaauuacagcggccc

SEQ ID NO: 765 - RNA, 19 nt, Artificial Sequence
  Synthetic
caagcccuugcacaugccu

SEQ ID NO: 766 - RNA, 19 nt, Artificial Sequence
  Synthetic
uacuuugcucaguaccacg

SEQ ID NO: 767 - RNA, 19 nt, Artificial Sequence
  Synthetic
gauccugaugaugaaccag

SEQ ID NO: 768 - RNA, 19 nt, Artificial Sequence
  Synthetic
guggccgauccuuaugauc

SEQ ID NO: 769 - RNA, 19 nt, Artificial Sequence
  Synthetic
caguccuuugaaagcaggg

SEQ ID NO: 770 - RNA, 19 nt, Artificial Sequence
  Synthetic
gaccuccuuauagaugagu

SEQ ID NO: 771 - RNA, 19 nt, Artificial Sequence
  Synthetic
uggaaaagccugaccuaug

SEQ ID NO: 772 - RNA, 19 nt, Artificial Sequence
  Synthetic
gaugaagucaucagcuuug

SEQ ID NO: 773 - RNA, 19 nt, Artificial Sequence
  Synthetic
gugccaccaccccuugacc

SEQ ID NO: 774 - RNA, 19 nt, Artificial Sequence
  Synthetic
caagaagagauggaguccu

SEQ ID NO: 775 - RNA, 19 nt, Artificial Sequence
  Synthetic
ugagcaccugguuucuguu

SEQ ID NO: 776 - RNA, 19 nt, Artificial Sequence
  Synthetic
ucuguugaucccacuucac

SEQ ID NO: 777 - RNA, 19 nt, Artificial Sequence
  Synthetic
cugugaggggaaggccuuu

SEQ ID NO: 778 - RNA, 19 nt, Artificial Sequence
  Synthetic
uucacgggaacucuccaaa

SEQ ID NO: 779 - RNA, 19 nt, Artificial Sequence
  Synthetic
auauuauucaagugccucu

SEQ ID NO: 780 - RNA, 19 nt, Artificial Sequence
  Synthetic
uuguugcagagauuuccuc

SEQ ID NO: 781 - RNA, 19 nt, Artificial Sequence
  Synthetic
ccaugguggaagggggugu

SEQ ID NO: 782 - RNA, 19 nt, Artificial Sequence
  Synthetic
ugcgugcgugugcgugcgu

SEQ ID NO: 783 - RNA, 19 nt, Artificial Sequence
  Synthetic
uguuagugugugugcaugu

SEQ ID NO: 784 - RNA, 19 nt, Artificial Sequence
  Synthetic
ugugugucugucuuugugg

SEQ ID NO: 785 - RNA, 19 nt, Artificial Sequence
  Synthetic
ggaggguaagacaauauga

SEQ ID NO: 786 - RNA, 19 nt, Artificial Sequence
  Synthetic
aacaaacuaugaucacagu

SEQ ID NO: 787 - RNA, 19 nt, Artificial Sequence
  Synthetic
ugacuuuacaggagguugu

SEQ ID NO: 788 - RNA, 19 nt, Artificial Sequence
  Synthetic
uggaugcuccagggcagcc

SEQ ID NO: 789 - RNA, 19 nt, Artificial Sequence
  Synthetic
cuccaccuugcucuucuuu

SEQ ID NO: 790 - RNA, 19 nt, Artificial Sequence
  Synthetic
ucugagaguuggcucaggc

SEQ ID NO: 791 - RNA, 19 nt, Artificial Sequence
  Synthetic
cagacaagagcugcugucc

SEQ ID NO: 792 - RNA, 19 nt, Artificial Sequence
  Synthetic
cuuuuaggaauauguucaa

SEQ ID NO: 793 - RNA, 19 nt, Artificial Sequence
  Synthetic
augcaaaguaaaaaaauau

SEQ ID NO: 794 - RNA, 19 nt, Artificial Sequence
  Synthetic
ugaauuguccccaaucccg

SEQ ID NO: 795 - RNA, 19 nt, Artificial Sequence
  Synthetic
ggucaugcuuuugccacuu

SEQ ID NO: 796 - RNA, 19 nt, Artificial Sequence
  Synthetic
uuggcuucuccugugaccc

SEQ ID NO: 797 - RNA, 19 nt, Artificial Sequence
  Synthetic
ccaccuugacgguggggcg

SEQ ID NO: 798 - RNA, 19 nt, Artificial Sequence
  Synthetic
guagacuugacaacauccc

SEQ ID NO: 799 - RNA, 19 nt, Artificial Sequence
  Synthetic
cacaguggcacggagagaa

SEQ ID NO: 800 - RNA, 19 nt, Artificial Sequence
  Synthetic
aggcccauaccuucugguu

SEQ ID NO: 801 - RNA, 19 nt, Artificial Sequence
  Synthetic
ugcuucagaccugacaccg

SEQ ID NO: 802 - RNA, 19 nt, Artificial Sequence
  Synthetic
gucccucagugauacguac

SEQ ID NO: 803 - RNA, 19 nt, Artificial Sequence
  Synthetic
cagccaaaaaggaccaacu

SEQ ID NO: 804 - RNA, 19 nt, Artificial Sequence
  Synthetic
uggcuucugugcacuagcc

SEQ ID NO: 805 - RNA, 19 nt, Artificial Sequence
  Synthetic
cugugauuaacuugcuuag

SEQ ID NO: 806 - RNA, 19 nt, Artificial Sequence
  Synthetic
guaugguucucagaucuug

SEQ ID NO: 807 - RNA, 19 nt, Artificial Sequence
  Synthetic
gacaguauauuugaaacug

SEQ ID NO: 808 - RNA, 19 nt, Artificial Sequence
  Synthetic
guaaauauguuugugccuu

SEQ ID NO: 809 - RNA, 19 nt, Artificial Sequence
  Synthetic
uaaaaggagagaagaaagu

SEQ ID NO: 810 - RNA, 19 nt, Artificial Sequence
  Synthetic
uguagauaguuaaaagacu

SEQ ID NO: 811 - RNA, 19 nt, Artificial Sequence
  Synthetic
ugcagcugcugaaguucug

SEQ ID NO: 812 - RNA, 19 nt, Artificial Sequence
  Synthetic
gagccgggcaagucgagag

SEQ ID NO: 813 - RNA, 19 nt, Artificial Sequence
  Synthetic
gggcuguuggacagcugcu

SEQ ID NO: 814 - RNA, 19 nt, Artificial Sequence
  Synthetic
uugugggcccggaguaauc

SEQ ID NO: 815 - RNA, 19 nt, Artificial Sequence
  Synthetic
caggcagccuucauaggcg

SEQ ID NO: 816 - RNA, 19 nt, Artificial Sequence
  Synthetic
ggucaugugugcaugugag

SEQ ID NO: 817 - RNA, 19 nt, Artificial Sequence
  Synthetic
gcacaugcguauaugugcg

SEQ ID NO: 818 - RNA, 19 nt, Artificial Sequence
  Synthetic
gucucucuuucucccucac

SEQ ID NO: 819 - RNA, 19 nt, Artificial Sequence
  Synthetic
cccccagguguugccauuu

SEQ ID NO: 820 - RNA, 19 nt, Artificial Sequence
  Synthetic
ucucugcuuacccuucacc

SEQ ID NO: 821 - RNA, 19 nt, Artificial Sequence
  Synthetic
cuuuggugcagagguuucu

SEQ ID NO: 822 - RNA, 19 nt, Artificial Sequence
  Synthetic
uugaauaucugccccagua

SEQ ID NO: 823 - RNA, 19 nt, Artificial Sequence
  Synthetic
agucagaagcagguucuug

SEQ ID NO: 824 - RNA, 19 nt, Artificial Sequence
  Synthetic
gaugucauguacuuccugu

SEQ ID NO: 825 - RNA, 19 nt, Artificial Sequence
  Synthetic
uguacucuuuauuucuagc

SEQ ID NO: 826 - RNA, 19 nt, Artificial Sequence
  Synthetic
cagagugaggauguguuuu

SEQ ID NO: 827 - RNA, 19 nt, Artificial Sequence
  Synthetic
ugcacgucuugcuauuuga

SEQ ID NO: 828 - RNA, 19 nt, Artificial Sequence
  Synthetic
agcaugcacagcugcuugu

SEQ ID NO: 829 - RNA, 19 nt, Artificial Sequence
  Synthetic
uccugcucucuucaggagg

SEQ ID NO: 830 - RNA, 19 nt, Artificial Sequence
  Synthetic
gcccuggugucaggcaggu

SEQ ID NO: 831 - RNA, 19 nt, Artificial Sequence
  Synthetic
uuugccagugaagacuucu

SEQ ID NO: 832 - RNA, 19 nt, Artificial Sequence
  Synthetic
uuggguaguuuagauccca

SEQ ID NO: 833 - RNA, 19 nt, Artificial Sequence
  Synthetic
augucaccucagcugauau

SEQ ID NO: 834 - RNA, 19 nt, Artificial Sequence
  Synthetic
uuauggcaagugauaucac

SEQ ID NO: 835 - RNA, 19 nt, Artificial Sequence
  Synthetic
ccucucuucagccccuagu

SEQ ID NO: 836 - RNA, 19 nt, Artificial Sequence
  Synthetic
ugcuauucuguguugaaca

SEQ ID NO: 837 - RNA, 19 nt, Artificial Sequence
  Synthetic
acaauugauacuucaggug

SEQ ID NO: 838 - RNA, 19 nt, Artificial Sequence
  Synthetic
gcuuuugaugugaaaauca

SEQ ID NO: 839 - RNA, 19 nt, Artificial Sequence
  Synthetic
augaaaagaggaacaggug

SEQ ID NO: 840 - RNA, 19 nt, Artificial Sequence
  Synthetic
ggauguauagcauuuuuau

SEQ ID NO: 841 - RNA, 19 nt, Artificial Sequence
  Synthetic
uucaugccaucuguuuuca

SEQ ID NO: 842 - RNA, 19 nt, Artificial Sequence
  Synthetic
aaccaacuauuuuugagga

SEQ ID NO: 843 - RNA, 19 nt, Artificial Sequence
  Synthetic
aauuaucaugggaaaagac

SEQ ID NO: 844 - RNA, 19 nt, Artificial Sequence
  Synthetic
ccagggcuuuucccaggaa

SEQ ID NO: 845 - RNA, 19 nt, Artificial Sequence
  Synthetic
auaucccaaacuucggaaa

SEQ ID NO: 846 - RNA, 19 nt, Artificial Sequence
  Synthetic
acaaguuauucucuucacu

SEQ ID NO: 847 - RNA, 19 nt, Artificial Sequence
  Synthetic
ucccaauaacuaaugcuaa

SEQ ID NO: 848 - RNA, 19 nt, Artificial Sequence
  Synthetic
agaaaugcugaaaaucaaa

SEQ ID NO: 849 - RNA, 19 nt, Artificial Sequence
  Synthetic
aguaaaaaauuaaagccca

SEQ ID NO: 850 - RNA, 19 nt, Artificial Sequence
  Synthetic
auaaggccagaaacuccuu

SEQ ID NO: 851 - RNA, 19 nt, Artificial Sequence
  Synthetic
uuugcugucuuucucuaaa

SEQ ID NO: 852 - RNA, 19 nt, Artificial Sequence
  Synthetic
auaugauuacuuuaaaaua

SEQ ID NO: 853 - RNA, 19 nt, Artificial Sequence
  Synthetic
aaaaaaguaacaagguguc

SEQ ID NO: 854 - RNA, 19 nt, Artificial Sequence
  Synthetic
cuuuuccacuccuauggaa

SEQ ID NO: 855 - RNA, 19 nt, Artificial Sequence
  Synthetic
aaagggucuucuuggcagc

SEQ ID NO: 856 - RNA, 19 nt, Artificial Sequence
  Synthetic
cuuaacauugacuucuugg

SEQ ID NO: 857 - RNA, 19 nt, Artificial Sequence
  Synthetic
guuuggggagaaauaaauu

SEQ ID NO: 858 - RNA, 19 nt, Artificial Sequence
  Synthetic
uuuguuucagaauuuugua

SEQ ID NO: 859 - RNA, 19 nt, Artificial Sequence
  Synthetic
auauuguaggaaucccuuu

SEQ ID NO: 860 - RNA, 19 nt, Artificial Sequence
  Synthetic
ugagaaugugauuccuuuu

SEQ ID NO: 861 - RNA, 19 nt, Artificial Sequence
  Synthetic
ugauggggagaaagggcaa

SEQ ID NO: 862 - RNA, 19 nt, Artificial Sequence
  Synthetic
aauuauuuuaauauuuugu

SEQ ID NO: 863 - RNA, 19 nt, Artificial Sequence
  Synthetic
uauuuucaacuuuauaaag

SEQ ID NO: 864 - RNA, 19 nt, Artificial Sequence
  Synthetic
gauaaaauauccucagggg

SEQ ID NO: 865 - RNA, 19 nt, Artificial Sequence
  Synthetic
guggagaagugucguuuuc

SEQ ID NO: 866 - RNA, 19 nt, Artificial Sequence
  Synthetic
cauaacuugcugaauuuca

SEQ ID NO: 867 - RNA, 19 nt, Artificial Sequence
  Synthetic
aggcauuuuguucuacaug

SEQ ID NO: 868 - RNA, 19 nt, Artificial Sequence
  Synthetic
gaggacucauauauuuaag

SEQ ID NO: 869 - RNA, 19 nt, Artificial Sequence
  Synthetic
gccuuuuguguaauaagaa

SEQ ID NO: 870 - RNA, 19 nt, Artificial Sequence
  Synthetic
aaguauaaagucacuucca

SEQ ID NO: 871 - RNA, 19 nt, Artificial Sequence
  Synthetic
aguguuggcugugugacag

SEQ ID NO: 872 - RNA, 19 nt, Artificial Sequence
  Synthetic
gaaucuuguauuugggcca

SEQ ID NO: 873 - RNA, 19 nt, Artificial Sequence
  Synthetic
aagguguuuccauuucuca

SEQ ID NO: 874 - RNA, 19 nt, Artificial Sequence
  Synthetic
aaucagugcagugauacau

SEQ ID NO: 875 - RNA, 19 nt, Artificial Sequence
  Synthetic
uguacuccagagggacagg

SEQ ID NO: 876 - RNA, 19 nt, Artificial Sequence
  Synthetic
gguggacccccugagucaa

SEQ ID NO: 877 - RNA, 19 nt, Artificial Sequence
  Synthetic
acuggagcaagaaggaagg

SEQ ID NO: 878 - RNA, 19 nt, Artificial Sequence
  Synthetic
gaggcagacugauggcgau

SEQ ID NO: 879 - RNA, 19 nt, Artificial Sequence
  Synthetic
uucccucucacccgggacu

SEQ ID NO: 880 - RNA, 19 nt, Artificial Sequence
  Synthetic
ucucccccuuucaaggaaa

SEQ ID NO: 881 - RNA, 19 nt, Artificial Sequence
  Synthetic
agugaaccuuuaaaguaaa

SEQ ID NO: 882 - RNA, 19 nt, Artificial Sequence
  Synthetic
aggccucaucuccuuuauu

SEQ ID NO: 883 - RNA, 19 nt, Artificial Sequence
  Synthetic
ugcaguucaaauccucacc

SEQ ID NO: 884 - RNA, 19 nt, Artificial Sequence
  Synthetic
cauccacagcaagaugaau

SEQ ID NO: 885 - RNA, 19 nt, Artificial Sequence
  Synthetic
uuuuaucagccauguuugg

SEQ ID NO: 886 - RNA, 19 nt, Artificial Sequence
  Synthetic
guuguaaaugcucguguga

SEQ ID NO: 887 - RNA, 19 nt, Artificial Sequence
  Synthetic
auuuccuacagaaauacug

SEQ ID NO: 888 - RNA, 19 nt, Artificial Sequence
  Synthetic
gcucugaauauuuuguaau

SEQ ID NO: 889 - RNA, 19 nt, Artificial Sequence
  Synthetic
uaaaggucuuugcacaugu

SEQ ID NO: 890 - RNA, 19 nt, Artificial Sequence
  Synthetic
ugaccacauacguguuagg

SEQ ID NO: 891 - RNA, 19 nt, Artificial Sequence
  Synthetic
gaggcugcaugcucuggaa

SEQ ID NO: 892 - RNA, 19 nt, Artificial Sequence
  Synthetic
agccuggacucuaagcugg

SEQ ID NO: 893 - RNA, 19 nt, Artificial Sequence
  Synthetic
gagcucuuggaagagcucu

SEQ ID NO: 894 - RNA, 19 nt, Artificial Sequence
  Synthetic
uucgguuucugagcauaau

SEQ ID NO: 895 - RNA, 19 nt, Artificial Sequence
  Synthetic
ugcucccaucuccugauuu

SEQ ID NO: 896 - RNA, 19 nt, Artificial Sequence
  Synthetic
ucucugaacagaaaacaaa

SEQ ID NO: 897 - RNA, 19 nt, Artificial Sequence
  Synthetic
aagagagaaugagggaaau

SEQ ID NO: 898 - RNA, 19 nt, Artificial Sequence
  Synthetic
uugcuauuuuauuuguauu

SEQ ID NO: 899 - RNA, 19 nt, Artificial Sequence
  Synthetic
ucaugaacuuggcuguaau

SEQ ID NO: 900 - RNA, 19 nt, Artificial Sequence
  Synthetic
ucaguuaugccguauagga

SEQ ID NO: 901 - RNA, 19 nt, Artificial Sequence
  Synthetic
augucagacaauaccacug

SEQ ID NO: 902 - RNA, 19 nt, Artificial Sequence
  Synthetic
gguuaaaauaaagccuauu

SEQ ID NO: 903 - RNA, 19 nt, Artificial Sequence
  Synthetic
uaaagccuauuuuucaaau

SEQ ID NO: 904 - RNA, 19 nt, Artificial Sequence
  Synthetic
ggcuccaguggucgcgguu

SEQ ID NO: 905 - RNA, 19 nt, Artificial Sequence
  Synthetic
agcugcugcgcccgcuaag

SEQ ID NO: 906 - RNA, 19 nt, Artificial Sequence
  Synthetic
ucgcaguacucccguucca

SEQ ID NO: 907 - RNA, 19 nt, Artificial Sequence
  Synthetic
ggccgacuccgggcugcgu

SEQ ID NO: 908 - RNA, 19 nt, Artificial Sequence
  Synthetic
gcaccuucgccccuacaag

SEQ ID NO: 909 - RNA, 19 nt, Artificial Sequence
  Synthetic
gcccgccgcgaucucccug

SEQ ID NO: 910 - RNA, 19 nt, Artificial Sequence
  Synthetic
uccggcgcucaagacugcg

SEQ ID NO: 911 - RNA, 19 nt, Artificial Sequence
  Synthetic
cuaagggcagggacgcgcu

SEQ ID NO: 912 - RNA, 19 nt, Artificial Sequence
  Synthetic
cgacuggggcaagccccgc

SEQ ID NO: 913 - RNA, 19 nt, Artificial Sequence
  Synthetic
cggcuggaugugccccugc

SEQ ID NO: 914 - RNA, 19 nt, Artificial Sequence
  Synthetic
ggcugcugucagccgcagc

SEQ ID NO: 915 - RNA, 19 nt, Artificial Sequence
  Synthetic
gcagacucccgcgcgcgcg

SEQ ID NO: 916 - RNA, 19 nt, Artificial Sequence
  Synthetic
ugcggcugccgcgaccccg

SEQ ID NO: 917 - RNA, 19 nt, Artificial Sequence
  Synthetic
gcuggucgcccgcgcaggu

SEQ ID NO: 918 - RNA, 19 nt, Artificial Sequence
  Synthetic
gccgggcggggaccuugcg

SEQ ID NO: 919 - RNA, 19 nt, Artificial Sequence
  Synthetic
gcccuugcugcccgcccag

SEQ ID NO: 920 - RNA, 19 nt, Artificial Sequence
  Synthetic
acccgcacccucuccccgg

SEQ ID NO: 921 - RNA, 19 nt, Artificial Sequence
  Synthetic
uguggggcccccgccugca

SEQ ID NO: 922 - RNA, 19 nt, Artificial Sequence
  Synthetic
cgggcaagaagguggcccu

SEQ ID NO: 923 - RNA, 19 nt, Artificial Sequence
  Synthetic
uuuuccagcggcagccgcc

SEQ ID NO: 924 - RNA, 19 nt, Artificial Sequence
  Synthetic
ugggccucuccugagacau

SEQ ID NO: 925 - RNA, 19 nt, Artificial Sequence
  Synthetic
gcuccugccgguagaacgu

SEQ ID NO: 926 - RNA, 19 nt, Artificial Sequence
  Synthetic
cccagauugucuuguucag

SEQ ID NO: 927 - RNA, 19 nt, Artificial Sequence
  Synthetic
gguaacgcucgggcaccuc

SEQ ID NO: 928 - RNA, 19 nt, Artificial Sequence
  Synthetic
ccacuggagacagguucug

SEQ ID NO: 929 - RNA, 19 nt, Artificial Sequence
  Synthetic
agccauaggcgccagagcc

SEQ ID NO: 930 - RNA, 19 nt, Artificial Sequence
  Synthetic
caaaagcagcacacacaga

SEQ ID NO: 931 - RNA, 19 nt, Artificial Sequence
  Synthetic
guaaccccguuuuuguguc

SEQ ID NO: 932 - RNA, 19 nt, Artificial Sequence
  Synthetic
gcuucuucacugccacacg

SEQ ID NO: 933 - RNA, 19 nt, Artificial Sequence
  Synthetic
acugaaauggucuggagag

SEQ ID NO: 934 - RNA, 19 nt, Artificial Sequence
  Synthetic
uuuucgcaugaaugaugga

SEQ ID NO: 935 - RNA, 19 nt, Artificial Sequence
  Synthetic
gcaguucucuguagguucu

SEQ ID NO: 936 - RNA, 19 nt, Artificial Sequence
  Synthetic
ucauauguuuaaguaaccg

SEQ ID NO: 937 - RNA, 19 nt, Artificial Sequence
  Synthetic
caaucacauuuucauguuu

SEQ ID NO: 938 - RNA, 19 nt, Artificial Sequence
  Synthetic
uaaaaacguccaacagacc

SEQ ID NO: 939 - RNA, 19 nt, Artificial Sequence
  Synthetic
ccagagaccuugcaggugu

SEQ ID NO: 940 - RNA, 19 nt, Artificial Sequence
  Synthetic
acacaucauugaauuccuc

SEQ ID NO: 941 - RNA, 19 nt, Artificial Sequence
  Synthetic
ugagaugggucaccagaua

SEQ ID NO: 942 - RNA, 19 nt, Artificial Sequence
  Synthetic
uguucagaucugcccccau

SEQ ID NO: 943 - RNA, 19 nt, Artificial Sequence
  Synthetic
ucugacauuucacaauguu

SEQ ID NO: 944 - RNA, 19 nt, Artificial Sequence
  Synthetic
cauggucaucuguaagcuu

SEQ ID NO: 945 - RNA, 19 nt, Artificial Sequence
  Synthetic
gguagauaaggaacugaac

SEQ ID NO: 946 - RNA, 19 nt, Artificial Sequence
  Synthetic
uuagaccucggagaauuug

SEQ ID NO: 947 - RNA, 19 nt, Artificial Sequence
  Synthetic
cagcugaauguauauacuu

SEQ ID NO: 948 - RNA, 19 nt, Artificial Sequence
  Synthetic
ggucccugugaauuauguc

SEQ ID NO: 949 - RNA, 19 nt, Artificial Sequence
  Synthetic
cuagauuacuagguuuuag

SEQ ID NO: 950 - RNA, 19 nt, Artificial Sequence
  Synthetic
cacagucuucauucacagc

SEQ ID NO: 951 - RNA, 19 nt, Artificial Sequence
  Synthetic
aauccagaaucuucagcuc

SEQ ID NO: 952 - RNA, 19 nt, Artificial Sequence
  Synthetic
ugugccgagccaguccaaa

SEQ ID NO: 953 - RNA, 19 nt, Artificial Sequence
  Synthetic
cugucauuucaucaucugu

SEQ ID NO: 954 - RNA, 19 nt, Artificial Sequence
  Synthetic
accuaguggccacguagcc

SEQ ID NO: 955 - RNA, 19 nt, Artificial Sequence
  Synthetic
ucucaggagcccuguacca

SEQ ID NO: 956 - RNA, 19 nt, Artificial Sequence
  Synthetic
gcauccaguucagcaugau

SEQ ID NO: 957 - RNA, 19 nt, Artificial Sequence
  Synthetic
caacugucugguuguaaug

SEQ ID NO: 958 - RNA, 19 nt, Artificial Sequence
  Synthetic
aucccacugaccaaauauc

SEQ ID NO: 959 - RNA, 19 nt, Artificial Sequence
  Synthetic
acagcucggccauuaugca

SEQ ID NO: 960 - RNA, 19 nt, Artificial Sequence
  Synthetic
acaauguucuuccagucaa

SEQ ID NO: 961 - RNA, 19 nt, Artificial Sequence
  Synthetic
uauggucuguaccaggaaa

SEQ ID NO: 962 - RNA, 19 nt, Artificial Sequence
  Synthetic
ugagcuucaacugaucaau

SEQ ID NO: 963 - RNA, 19 nt, Artificial Sequence
  Synthetic
uuccaacgagucuuaaaau

SEQ ID NO: 964 - RNA, 19 nt, Artificial Sequence
  Synthetic
aaagcucagccccuggggu

SEQ ID NO: 965 - RNA, 19 nt, Artificial Sequence
  Synthetic
cugaggagauuuucuucaa

SEQ ID NO: 966 - RNA, 19 nt, Artificial Sequence
  Synthetic
uauaguuucuugcagacuc

SEQ ID NO: 967 - RNA, 19 nt, Artificial Sequence
  Synthetic
ucugagucaaagacugaau

SEQ ID NO: 968 - RNA, 19 nt, Artificial Sequence
  Synthetic
caaaguucaucuucggcau

SEQ ID NO: 969 - RNA, 19 nt, Artificial Sequence
  Synthetic
caccaauaaauacauucgc

SEQ ID NO: 970 - RNA, 19 nt, Artificial Sequence
  Synthetic
cgacagccaggggauuggc

SEQ ID NO: 971 - RNA, 19 nt, Artificial Sequence
  Synthetic
gcaucuucuccagcaaguc

SEQ ID NO: 972 - RNA, 19 nt, Artificial Sequence
  Synthetic
uaucugaguccaauacaag

SEQ ID NO: 973 - RNA, 19 nt, Artificial Sequence
  Synthetic
gggccgcuguaauucucuu

SEQ ID NO: 974 - RNA, 19 nt, Artificial Sequence
  Synthetic
aggcaugugcaagggcuug

SEQ ID NO: 975 - RNA, 19 nt, Artificial Sequence
  Synthetic
cgugguacugagcaaagua

SEQ ID NO: 976 - RNA, 19 nt, Artificial Sequence
  Synthetic
cugguucaucaucaggauc

SEQ ID NO: 977 - RNA, 19 nt, Artificial Sequence
  Synthetic
gaucauaaggaucggccac

SEQ ID NO: 978 - RNA, 19 nt, Artificial Sequence
  Synthetic
cccugcuuucaaaggacug

SEQ ID NO: 979 - RNA, 19 nt, Artificial Sequence
  Synthetic
acucaucuauaaggagguc

SEQ ID NO: 980 - RNA, 19 nt, Artificial Sequence
  Synthetic
cauaggucaggcuuuucca

SEQ ID NO: 981 - RNA, 19 nt, Artificial Sequence
  Synthetic
caaagcugaugacuucauc

SEQ ID NO: 982 - RNA, 19 nt, Artificial Sequence
  Synthetic
ggucaaggggugguggcac

SEQ ID NO: 983 - RNA, 19 nt, Artificial Sequence
  Synthetic
aggacuccaucucuucuug

SEQ ID NO: 984 - RNA, 19 nt, Artificial Sequence
  Synthetic
aacagaaaccaggugcuca

SEQ ID NO: 985 - RNA, 19 nt, Artificial Sequence
  Synthetic
gugaagugggaucaacaga

SEQ ID NO: 986 - RNA, 19 nt, Artificial Sequence
  Synthetic
aaaggccuuccccucacag

SEQ ID NO: 987 - RNA, 19 nt, Artificial Sequence
  Synthetic
uuuggagaguucccgugaa

SEQ ID NO: 988 - RNA, 19 nt, Artificial Sequence
  Synthetic
agaggcacuugaauaauau

SEQ ID NO: 989 - RNA, 19 nt, Artificial Sequence
  Synthetic
gaggaaaucucugcaacaa

SEQ ID NO: 990 - RNA, 19 nt, Artificial Sequence
  Synthetic
acacccccuuccaccaugg

SEQ ID NO: 991 - RNA, 19 nt, Artificial Sequence
  Synthetic
acgcacgcacacgcacgca

SEQ ID NO: 992 - RNA, 19 nt, Artificial Sequence
  Synthetic
acaugcacacacacuaaca

SEQ ID NO: 993 - RNA, 19 nt, Artificial Sequence
  Synthetic
ccacaaagacagacacaca

SEQ ID NO: 994 - RNA, 19 nt, Artificial Sequence
  Synthetic
ucauauugucuuacccucc

SEQ ID NO: 995 - RNA, 19 nt, Artificial Sequence
  Synthetic
acugugaucauaguuuguu

SEQ ID NO: 996 - RNA, 19 nt, Artificial Sequence
  Synthetic
acaaccuccuguaaaguca

SEQ ID NO: 997 - RNA, 19 nt, Artificial Sequence
  Synthetic
ggcugcccuggagcaucca

SEQ ID NO: 998 - RNA, 19 nt, Artificial Sequence
  Synthetic
aaagaagagcaagguggag

SEQ ID NO: 999 - RNA, 19 nt, Artificial Sequence
  Synthetic
gccugagccaacucucaga

SEQ ID NO: 1000 - RNA, 19 nt, Artificial Sequence
  Synthetic
ggacagcagcucuugucug

SEQ ID NO: 1001 - RNA, 19 nt, Artificial Sequence
  Synthetic
uugaacauauuccuaaaag

SEQ ID NO: 1002 - RNA, 19 nt, Artificial Sequence
  Synthetic
auauuuuuuuacuuugcau

SEQ ID NO: 1003 - RNA, 19 nt, Artificial Sequence
  Synthetic
cgggauuggggacaauuca

SEQ ID NO: 1004 - RNA, 19 nt, Artificial Sequence
  Synthetic
aaguggcaaaagcaugacc

SEQ ID NO: 1005 - RNA, 19 nt, Artificial Sequence
  Synthetic
gggucacaggagaagccaa

SEQ ID NO: 1006 - RNA, 19 nt, Artificial Sequence
  Synthetic
cgccccaccgucaaggugg

SEQ ID NO: 1007 - RNA, 19 nt, Artificial Sequence
  Synthetic
gggauguugucaagucuac

SEQ ID NO: 1008 - RNA, 19 nt, Artificial Sequence
  Synthetic
uucucuccgugccacugug

SEQ ID NO: 1009 - RNA, 19 nt, Artificial Sequence
  Synthetic
aaccagaagguaugggccu

SEQ ID NO: 1010 - RNA, 19 nt, Artificial Sequence
  Synthetic
cggugucaggucugaagca

SEQ ID NO: 1011 - RNA, 19 nt, Artificial Sequence
  Synthetic
guacguaucacugagggac

SEQ ID NO: 1012 - RNA, 19 nt, Artificial Sequence
  Synthetic
aguugguccuuuuuggcug

SEQ ID NO: 1013 - RNA, 19 nt, Artificial Sequence
  Synthetic
ggcuagugcacagaagcca

SEQ ID NO: 1014 - RNA, 19 nt, Artificial Sequence
  Synthetic
cuaagcaaguuaaucacag

SEQ ID NO: 1015 - RNA, 19 nt, Artificial Sequence
  Synthetic
caagaucugagaaccauac

SEQ ID NO: 1016 - RNA, 19 nt, Artificial Sequence
  Synthetic
caguuucaaauauacuguc

SEQ ID NO: 1017 - RNA, 19 nt, Artificial Sequence
  Synthetic
aaggcacaaacauauuuac

SEQ ID NO: 1018 - RNA, 19 nt, Artificial Sequence
  Synthetic
acuuucuucucuccuuuua

SEQ ID NO: 1019 - RNA, 19 nt, Artificial Sequence
  Synthetic
agucuuuuaacuaucuaca

SEQ ID NO: 1020 - RNA, 19 nt, Artificial Sequence
  Synthetic
cagaacuucagcagcugca

SEQ ID NO: 1021 - RNA, 19 nt, Artificial Sequence
  Synthetic
cucucgacuugcccggcuc

SEQ ID NO: 1022 - RNA, 19 nt, Artificial Sequence
  Synthetic
agcagcuguccaacagccc

SEQ ID NO: 1023 - RNA, 19 nt, Artificial Sequence
  Synthetic
gauuacuccgggcccacaa

SEQ ID NO: 1024 - RNA, 19 nt, Artificial Sequence
  Synthetic
cgccuaugaaggcugccug

SEQ ID NO: 1025 - RNA, 19 nt, Artificial Sequence
  Synthetic
cucacaugcacacaugacc

SEQ ID NO: 1026 - RNA, 19 nt, Artificial Sequence
  Synthetic
cgcacauauacgcaugugc

SEQ ID NO: 1027 - RNA, 19 nt, Artificial Sequence
  Synthetic
gugagggagaaagagagac

SEQ ID NO: 1028 - RNA, 19 nt, Artificial Sequence
  Synthetic
aaauggcaacaccuggggg

SEQ ID NO: 1029 - RNA, 19 nt, Artificial Sequence
  Synthetic
ggugaaggguaagcagaga

SEQ ID NO: 1030 - RNA, 19 nt, Artificial Sequence
  Synthetic
agaaaccucugcaccaaag

SEQ ID NO: 1031 - RNA, 19 nt, Artificial Sequence
  Synthetic
uacuggggcagauauucaa

SEQ ID NO: 1032 - RNA, 19 nt, Artificial Sequence
  Synthetic
caagaaccugcuucugacu

SEQ ID NO: 1033 - RNA, 19 nt, Artificial Sequence
  Synthetic
acaggaaguacaugacauc

SEQ ID NO: 1034 - RNA, 19 nt, Artificial Sequence
  Synthetic
gcuagaaauaaagaguaca

SEQ ID NO: 1035 - RNA, 19 nt, Artificial Sequence
  Synthetic
aaaacacauccucacucug

SEQ ID NO: 1036 - RNA, 19 nt, Artificial Sequence
  Synthetic
ucaaauagcaagacgugca

SEQ ID NO: 1037 - RNA, 19 nt, Artificial Sequence
  Synthetic
acaagcagcugugcaugcu

SEQ ID NO: 1038 - RNA, 19 nt, Artificial Sequence
  Synthetic
ccuccugaagagagcagga

SEQ ID NO: 1039 - RNA, 19 nt, Artificial Sequence
  Synthetic
accugccugacaccagggc

SEQ ID NO: 1040 - RNA, 19 nt, Artificial Sequence
  Synthetic
agaagucuucacuggcaaa

SEQ ID NO: 1041 - RNA, 19 nt, Artificial Sequence
  Synthetic
ugggaucuaaacuacccaa

SEQ ID NO: 1042 - RNA, 19 nt, Artificial Sequence
  Synthetic
auaucagcugaggugacau

SEQ ID NO: 1043 - RNA, 19 nt, Artificial Sequence
  Synthetic
gugauaucacuugccauaa

SEQ ID NO: 1044 - RNA, 19 nt, Artificial Sequence
  Synthetic
acuaggggcugaagagagg

SEQ ID NO: 1045 - RNA, 19 nt, Artificial Sequence
  Synthetic
uguucaacacagaauagca

SEQ ID NO: 1046 - RNA, 19 nt, Artificial Sequence
  Synthetic
caccugaaguaucaauugu

SEQ ID NO: 1047 - RNA, 19 nt, Artificial Sequence
  Synthetic
ugauuuucacaucaaaagc

SEQ ID NO: 1048 - RNA, 19 nt, Artificial Sequence
  Synthetic
caccuguuccucuuuucau

SEQ ID NO: 1049 - RNA, 19 nt, Artificial Sequence
  Synthetic
auaaaaaugcuauacaucc

SEQ ID NO: 1050 - RNA, 19 nt, Artificial Sequence
  Synthetic
ugaaaacagauggcaugaa

SEQ ID NO: 1051 - RNA, 19 nt, Artificial Sequence
  Synthetic
uccucaaaaauaguugguu

SEQ ID NO: 1052 - RNA, 19 nt, Artificial Sequence
  Synthetic
gucuuuucccaugauaauu

SEQ ID NO: 1053 - RNA, 19 nt, Artificial Sequence
  Synthetic
uuccugggaaaagcccugg

SEQ ID NO: 1054 - RNA, 19 nt, Artificial Sequence
  Synthetic
uuuccgaaguuugggauau

SEQ ID NO: 1055 - RNA, 19 nt, Artificial Sequence
  Synthetic
agugaagagaauaacuugu

SEQ ID NO: 1056 - RNA, 19 nt, Artificial Sequence
  Synthetic
uuagcauuaguuauuggga

SEQ ID NO: 1057 - RNA, 19 nt, Artificial Sequence
  Synthetic
uuugauuuucagcauuucu

SEQ ID NO: 1058 - RNA, 19 nt, Artificial Sequence
  Synthetic
ugggcuuuaauuuuuuacu

SEQ ID NO: 1059 - RNA, 19 nt, Artificial Sequence
  Synthetic
aaggaguuucuggccuuau

SEQ ID NO: 1060 - RNA, 19 nt, Artificial Sequence
  Synthetic
uuuagagaaagacagcaaa

SEQ ID NO: 1061 - RNA, 19 nt, Artificial Sequence
  Synthetic
uauuuuaaaguaaucauau

SEQ ID NO: 1062 - RNA, 19 nt, Artificial Sequence
  Synthetic
gacaccuuguuacuuuuuu

SEQ ID NO: 1063 - RNA, 19 nt, Artificial Sequence
  Synthetic
uuccauaggaguggaaaag

SEQ ID NO: 1064 - RNA, 19 nt, Artificial Sequence
  Synthetic
gcugccaagaagacccuuu

SEQ ID NO: 1065 - RNA, 19 nt, Artificial Sequence
  Synthetic
ccaagaagucaauguuaag

SEQ ID NO: 1066 - RNA, 19 nt, Artificial Sequence
  Synthetic
aauuuauuucuccccaaac

SEQ ID NO: 1067 - RNA, 19 nt, Artificial Sequence
  Synthetic
uacaaaauucugaaacaaa

SEQ ID NO: 1068 - RNA, 19 nt, Artificial Sequence
  Synthetic
aaagggauuccuacaauau

SEQ ID NO: 1069 - RNA, 19 nt, Artificial Sequence
  Synthetic
aaaaggaaucacauucuca

SEQ ID NO: 1070 - RNA, 19 nt, Artificial Sequence
  Synthetic
uugcccuuucuccccauca

SEQ ID NO: 1071 - RNA, 19 nt, Artificial Sequence
  Synthetic
acaaaauauuaaaauaauu

SEQ ID NO: 1072 - RNA, 19 nt, Artificial Sequence
  Synthetic
cuuuauaaaguugaaaaua

SEQ ID NO: 1073 - RNA, 19 nt, Artificial Sequence
  Synthetic
ccccugaggauauuuuauc

SEQ ID NO: 1074 - RNA, 19 nt, Artificial Sequence
  Synthetic
gaaaacgacacuucuccac

SEQ ID NO: 1075 - RNA, 19 nt, Artificial Sequence
  Synthetic
ugaaauucagcaaguuaug

SEQ ID NO: 1076 - RNA, 19 nt, Artificial Sequence
  Synthetic
cauguagaacaaaaugccu

SEQ ID NO: 1077 - RNA, 19 nt, Artificial Sequence
  Synthetic
cuuaaauauaugaguccuc

SEQ ID NO: 1078 - RNA, 19 nt, Artificial Sequence
  Synthetic
uucuuauuacacaaaaggc

SEQ ID NO: 1079 - RNA, 19 nt, Artificial Sequence
  Synthetic
uggaagugacuuuauacuu

SEQ ID NO: 1080 - RNA, 19 nt, Artificial Sequence
  Synthetic
cugucacacagccaacacu

SEQ ID NO: 1081 - RNA, 19 nt, Artificial Sequence
  Synthetic
uggcccaaauacaagauuc

SEQ ID NO: 1082 - RNA, 19 nt, Artificial Sequence
  Synthetic
ugagaaauggaaacaccuu

SEQ ID NO: 1083 - RNA, 19 nt, Artificial Sequence
  Synthetic
auguaucacugcacugauu

SEQ ID NO: 1084 - RNA, 19 nt, Artificial Sequence
  Synthetic
ccugucccucuggaguaca

SEQ ID NO: 1085 - RNA, 19 nt, Artificial Sequence
  Synthetic
uugacucaggggguccacc

SEQ ID NO: 1086 - RNA, 19 nt, Artificial Sequence
  Synthetic
ccuuccuucuugcuccagu

SEQ ID NO: 1087 - RNA, 19 nt, Artificial Sequence
  Synthetic
aucgccaucagucugccuc

SEQ ID NO: 1088 - RNA, 19 nt, Artificial Sequence
  Synthetic
agucccgggugagagggaa

SEQ ID NO: 1089 - RNA, 19 nt, Artificial Sequence
  Synthetic
uuuccuugaaagggggaga

SEQ ID NO: 1090 - RNA, 19 nt, Artificial Sequence
  Synthetic
uuuacuuuaaagguucacu

SEQ ID NO: 1091 - RNA, 19 nt, Artificial Sequence
  Synthetic
aauaaaggagaugaggccu

SEQ ID NO: 1092 - RNA, 19 nt, Artificial Sequence
  Synthetic
ggugaggauuugaacugca

SEQ ID NO: 1093 - RNA, 19 nt, Artificial Sequence
  Synthetic
auucaucuugcuguggaug

SEQ ID NO: 1094 - RNA, 19 nt, Artificial Sequence
  Synthetic
ccaaacauggcugauaaaa

SEQ ID NO: 1095 - RNA, 19 nt, Artificial Sequence
  Synthetic
ucacacgagcauuuacaac

SEQ ID NO: 1096 - RNA, 19 nt, Artificial Sequence
  Synthetic
caguauuucuguaggaaau

SEQ ID NO: 1097 - RNA, 19 nt, Artificial Sequence
  Synthetic
auuacaaaauauucagagc

SEQ ID NO: 1098 - RNA, 19 nt, Artificial Sequence
  Synthetic
acaugugcaaagaccuuua

SEQ ID NO: 1099 - RNA, 19 nt, Artificial Sequence
  Synthetic
ccuaacacguaugugguca

SEQ ID NO: 1100 - RNA, 19 nt, Artificial Sequence
  Synthetic
uuccagagcaugcagccuc

SEQ ID NO: 1101 - RNA, 19 nt, Artificial Sequence
  Synthetic
ccagcuuagaguccaggcu

SEQ ID NO: 1102 - RNA, 19 nt, Artificial Sequence
  Synthetic
agagcucuuccaagagcuc

SEQ ID NO: 1103 - RNA, 19 nt, Artificial Sequence
  Synthetic
auuaugcucagaaaccgaa

SEQ ID NO: 1104 - RNA, 19 nt, Artificial Sequence
  Synthetic
aaaucaggagaugggagca

SEQ ID NO: 1105 - RNA, 19 nt, Artificial Sequence
  Synthetic
uuuguuuucuguucagaga

SEQ ID NO: 1106 - RNA, 19 nt, Artificial Sequence
  Synthetic
auuucccucauucucucuu

SEQ ID NO: 1107 - RNA, 19 nt, Artificial Sequence
  Synthetic
aauacaaauaaaauagcaa

SEQ ID NO: 1108 - RNA, 19 nt, Artificial Sequence
  Synthetic
auuacagccaaguucauga

SEQ ID NO: 1109 - RNA, 19 nt, Artificial Sequence
  Synthetic
uccuauacggcauaacuga

SEQ ID NO: 1110 - RNA, 19 nt, Artificial Sequence
  Synthetic
cagugguauugucugacau

SEQ ID NO: 1111 - RNA, 19 nt, Artificial Sequence
  Synthetic
aauaggcuuuauuuuaacc

SEQ ID NO: 1112 - RNA, 19 nt, Artificial Sequence
  Synthetic
auuugaaaaauaggcuuua

SEQ ID NO: 1113 - RNA, 19 nt, Artificial Sequence
  Synthetic
aguugcacugaguguggcu

SEQ ID NO: 1114 - RNA, 19 nt, Artificial Sequence
  Synthetic
ugaagcagcgaggcgggag

SEQ ID NO: 1115 - RNA, 19 nt, Artificial Sequence
  Synthetic
guggaggugcgcggaguca

SEQ ID NO: 1116 - RNA, 19 nt, Artificial Sequence
  Synthetic
aggcagacagacagacaca

SEQ ID NO: 1117 - RNA, 19 nt, Artificial Sequence
  Synthetic
agccagccagccaggucgg

SEQ ID NO: 1118 - RNA, 19 nt, Artificial Sequence
  Synthetic
gcaguauaguccgaacugc

SEQ ID NO: 1119 - RNA, 19 nt, Artificial Sequence
  Synthetic
caaaucuuauuuucuuuuc

SEQ ID NO: 1120 - RNA, 19 nt, Artificial Sequence
  Synthetic
caccuucucucuaacugcc

SEQ ID NO: 1121 - RNA, 19 nt, Artificial Sequence
  Synthetic
ccagagcuagcgccugugg

SEQ ID NO: 1122 - RNA, 19 nt, Artificial Sequence
  Synthetic
gcucccgggcuggugguuc

SEQ ID NO: 1123 - RNA, 19 nt, Artificial Sequence
  Synthetic
cgggaguguccagagagcc

SEQ ID NO: 1124 - RNA, 19 nt, Artificial Sequence
  Synthetic
cuugucuccagccggcccc

SEQ ID NO: 1125 - RNA, 19 nt, Artificial Sequence
  Synthetic
cgggaggagagcccugcug

SEQ ID NO: 1126 - RNA, 19 nt, Artificial Sequence
  Synthetic
gcccaggcgcuguugacag

SEQ ID NO: 1127 - RNA, 19 nt, Artificial Sequence
  Synthetic
gcggcggaaagcagcggua

SEQ ID NO: 1128 - RNA, 19 nt, Artificial Sequence
  Synthetic
accccacgcgcccgccggg

SEQ ID NO: 1129 - RNA, 19 nt, Artificial Sequence
  Synthetic
gggacgucggcgagcggcu

SEQ ID NO: 1130 - RNA, 19 nt, Artificial Sequence
  Synthetic
ugcagcagcaaagaacuuu

SEQ ID NO: 1131 - RNA, 19 nt, Artificial Sequence
  Synthetic
ucccggcggggaggaccgg

SEQ ID NO: 1132 - RNA, 19 nt, Artificial Sequence
  Synthetic
gagacaaguggcagagucc

SEQ ID NO: 1133 - RNA, 19 nt, Artificial Sequence
  Synthetic
ccggagcgaacuuuugcaa

SEQ ID NO: 1134 - RNA, 19 nt, Artificial Sequence
  Synthetic
agccuuuccugcgucuuag

SEQ ID NO: 1135 - RNA, 19 nt, Artificial Sequence
  Synthetic
ggcuucuccacggcgguaa

SEQ ID NO: 1136 - RNA, 19 nt, Artificial Sequence
  Synthetic
aagaccagaaggcggcgga

SEQ ID NO: 1137 - RNA, 19 nt, Artificial Sequence
  Synthetic
agagccacgcaagagaaga

SEQ ID NO: 1138 - RNA, 19 nt, Artificial Sequence
  Synthetic
aaggacgugcgcucagcuu

SEQ ID NO: 1139 - RNA, 19 nt, Artificial Sequence
  Synthetic
ucgcucgcaccgguuguug

SEQ ID NO: 1140 - RNA, 19 nt, Artificial Sequence
  Synthetic
gaacuugggcgagcgcgag

SEQ ID NO: 1141 - RNA, 19 nt, Artificial Sequence
  Synthetic
gccgcggcugccgggcgcc

SEQ ID NO: 1142 - RNA, 19 nt, Artificial Sequence
  Synthetic
ccccucccccuagcagcgg

SEQ ID NO: 1143 - RNA, 19 nt, Artificial Sequence
  Synthetic
gaggaggggacaagucguc

SEQ ID NO: 1144 - RNA, 19 nt, Artificial Sequence
  Synthetic
cggaguccgggcggccaag

SEQ ID NO: 1145 - RNA, 19 nt, Artificial Sequence
  Synthetic
gacccgccgccggccggcc

SEQ ID NO: 1146 - RNA, 19 nt, Artificial Sequence
  Synthetic
cacugcaggguccgcacug

SEQ ID NO: 1147 - RNA, 19 nt, Artificial Sequence
  Synthetic
gauccgcuccgcggggaga

SEQ ID NO: 1148 - RNA, 19 nt, Artificial Sequence
  Synthetic
agccgcugcucugggaagu

SEQ ID NO: 1149 - RNA, 19 nt, Artificial Sequence
  Synthetic
ugaguucgccugcggacuc

SEQ ID NO: 1150 - RNA, 19 nt, Artificial Sequence
  Synthetic
ccgaggaaccgcugcgccc

SEQ ID NO: 1151 - RNA, 19 nt, Artificial Sequence
  Synthetic
cgaagagcgcucagugagu

SEQ ID NO: 1152 - RNA, 19 nt, Artificial Sequence
  Synthetic
ugaccgcgacuuuucaaag

SEQ ID NO: 1153 - RNA, 19 nt, Artificial Sequence
  Synthetic
gccggguagcgcgcgcgag

SEQ ID NO: 1154 - RNA, 19 nt, Artificial Sequence
  Synthetic
gucgacaaguaagagugcg

SEQ ID NO: 1155 - RNA, 19 nt, Artificial Sequence
  Synthetic
gggaggcaucuuaauuaac

SEQ ID NO: 1156 - RNA, 19 nt, Artificial Sequence
  Synthetic
cccugcgcucccuggagcg

SEQ ID NO: 1157 - RNA, 19 nt, Artificial Sequence
  Synthetic
gagcuggugaggagggcgc

SEQ ID NO: 1158 - RNA, 19 nt, Artificial Sequence
  Synthetic
cagcggggacgacagccag

SEQ ID NO: 1159 - RNA, 19 nt, Artificial Sequence
  Synthetic
gcgggugcgugcgcucuua

SEQ ID NO: 1160 - RNA, 19 nt, Artificial Sequence
  Synthetic
agagaaacuuucccuguca

SEQ ID NO: 1161 - RNA, 19 nt, Artificial Sequence
  Synthetic
aaaggcuccggggggcgcg

SEQ ID NO: 1162 - RNA, 19 nt, Artificial Sequence
  Synthetic
gggugucccccgcuugcca

SEQ ID NO: 1163 - RNA, 19 nt, Artificial Sequence
  Synthetic
agagcccuguugcggcccc

SEQ ID NO: 1164 - RNA, 19 nt, Artificial Sequence
  Synthetic
cgaaacuugugcgcgcacg

SEQ ID NO: 1165 - RNA, 19 nt, Artificial Sequence
  Synthetic
gccaaacuaaccucacgug

SEQ ID NO: 1166 - RNA, 19 nt, Artificial Sequence
  Synthetic
gaagugacggacuguucua

SEQ ID NO: 1167 - RNA, 19 nt, Artificial Sequence
  Synthetic
augacugcaaagauggaaa

SEQ ID NO: 1168 - RNA, 19 nt, Artificial Sequence
  Synthetic
acgaccuucuaugacgaug

SEQ ID NO: 1169 - RNA, 19 nt, Artificial Sequence
  Synthetic
gcccucaacgccucguucc

SEQ ID NO: 1170 - RNA, 19 nt, Artificial Sequence
  Synthetic
cucccguccgagagcggac

SEQ ID NO: 1171 - RNA, 19 nt, Artificial Sequence
  Synthetic
ccuuauggcuacaguaacc

SEQ ID NO: 1172 - RNA, 19 nt, Artificial Sequence
  Synthetic
cccaagauccugaaacaga

SEQ ID NO: 1173 - RNA, 19 nt, Artificial Sequence
  Synthetic
agcaugacccugaaccugg

SEQ ID NO: 1174 - RNA, 19 nt, Artificial Sequence
  Synthetic
gccgacccaguggggagcc

SEQ ID NO: 1175 - RNA, 19 nt, Artificial Sequence
  Synthetic
cugaagccgcaccuccgcg

SEQ ID NO: 1176 - RNA, 19 nt, Artificial Sequence
  Synthetic
gccaagaacucggaccucc

SEQ ID NO: 1177 - RNA, 19 nt, Artificial Sequence
  Synthetic
cucaccucgcccgacgugg

SEQ ID NO: 1178 - RNA, 19 nt, Artificial Sequence
  Synthetic
gggcugcucaagcuggcgu

SEQ ID NO: 1179 - RNA, 19 nt, Artificial Sequence
  Synthetic
ucgcccgagcuggagcgcc

SEQ ID NO: 1180 - RNA, 19 nt, Artificial Sequence
  Synthetic
cugauaauccaguccagca

SEQ ID NO: 1181 - RNA, 19 nt, Artificial Sequence
  Synthetic
aacgggcacaucaccacca

SEQ ID NO: 1182 - RNA, 19 nt, Artificial Sequence
  Synthetic
acgccgacccccacccagu

SEQ ID NO: 1183 - RNA, 19 nt, Artificial Sequence
  Synthetic
uuccugugccccaagaacg

SEQ ID NO: 1184 - RNA, 19 nt, Artificial Sequence
  Synthetic
gugacagaugagcaggagg

SEQ ID NO: 1185 - RNA, 19 nt, Artificial Sequence
  Synthetic
ggguucgccgagggcuucg

SEQ ID NO: 1186 - RNA, 19 nt, Artificial Sequence
  Synthetic
gugcgcgcccuggccgaac

SEQ ID NO: 1187 - RNA, 19 nt, Artificial Sequence
  Synthetic
cugcacagccagaacacgc

SEQ ID NO: 1188 - RNA, 19 nt, Artificial Sequence
  Synthetic
cugcccagcgucacgucgg

SEQ ID NO: 1189 - RNA, 19 nt, Artificial Sequence
  Synthetic
gcggcgcagccggucaacg

SEQ ID NO: 1190 - RNA, 19 nt, Artificial Sequence
  Synthetic
ggggcaggcaugguggcuc

SEQ ID NO: 1191 - RNA, 19 nt, Artificial Sequence
  Synthetic
cccgcgguagccucggugg

SEQ ID NO: 1192 - RNA, 19 nt, Artificial Sequence
  Synthetic
gcagggggcagcggcagcg

SEQ ID NO: 1193 - RNA, 19 nt, Artificial Sequence
  Synthetic
ggcggcuucagcgccagcc

SEQ ID NO: 1194 - RNA, 19 nt, Artificial Sequence
  Synthetic
cugcacagcgagccgccgg

SEQ ID NO: 1195 - RNA, 19 nt, Artificial Sequence
  Synthetic
gucuacgcaaaccucagca

SEQ ID NO: 1196 - RNA, 19 nt, Artificial Sequence
  Synthetic
aacuucaacccaggcgcgc

SEQ ID NO: 1197 - RNA, 19 nt, Artificial Sequence
  Synthetic
cugagcagcggcggcgggg

SEQ ID NO: 1198 - RNA, 19 nt, Artificial Sequence
  Synthetic
gcgcccuccuacggcgcgg

SEQ ID NO: 1199 - RNA, 19 nt, Artificial Sequence
  Synthetic
gccggccuggccuuucccg

SEQ ID NO: 1200 - RNA, 19 nt, Artificial Sequence
  Synthetic
gcgcaaccccagcagcagc

SEQ ID NO: 1201 - RNA, 19 nt, Artificial Sequence
  Synthetic
cagcagccgccgcaccacc

SEQ ID NO: 1202 - RNA, 19 nt, Artificial Sequence
  Synthetic
cugccccagcagaugcccg

SEQ ID NO: 1203 - RNA, 19 nt, Artificial Sequence
  Synthetic
gugcagcacccgcggcugc

SEQ ID NO: 1204 - RNA, 19 nt, Artificial Sequence
  Synthetic
caggcccugaaggaggagc

SEQ ID NO: 1205 - RNA, 19 nt, Artificial Sequence
  Synthetic
ccucagacagugcccgaga

SEQ ID NO: 1206 - RNA, 19 nt, Artificial Sequence
  Synthetic
augcccggcgagacaccgc

SEQ ID NO: 1207 - RNA, 19 nt, Artificial Sequence
  Synthetic
ccccugucccccaucgaca

SEQ ID NO: 1208 - RNA, 19 nt, Artificial Sequence
  Synthetic
auggagucccaggagcgga

SEQ ID NO: 1209 - RNA, 19 nt, Artificial Sequence
  Synthetic
aucaaggcggagaggaagc

SEQ ID NO: 1210 - RNA, 19 nt, Artificial Sequence
  Synthetic
cgcaugaggaaccgcaucg

SEQ ID NO: 1211 - RNA, 19 nt, Artificial Sequence
  Synthetic
gcugccuccaagugccgaa

SEQ ID NO: 1212 - RNA, 19 nt, Artificial Sequence
  Synthetic
aaaaggaagcuggagagaa

SEQ ID NO: 1213 - RNA, 19 nt, Artificial Sequence
  Synthetic
aucgcccggcuggaggaaa

SEQ ID NO: 1214 - RNA, 19 nt, Artificial Sequence
  Synthetic
aaagugaaaaccuugaaag

SEQ ID NO: 1215 - RNA, 19 nt, Artificial Sequence
  Synthetic
gcucagaacucggagcugg

SEQ ID NO: 1216 - RNA, 19 nt, Artificial Sequence
  Synthetic
gcguccacggccaacaugc

SEQ ID NO: 1217 - RNA, 19 nt, Artificial Sequence
  Synthetic
cucagggaacagguggcac

SEQ ID NO: 1218 - RNA, 19 nt, Artificial Sequence
  Synthetic
cagcuuaaacagaaaguca

SEQ ID NO: 1219 - RNA, 19 nt, Artificial Sequence
  Synthetic
augaaccacguuaacagug

SEQ ID NO: 1220 - RNA, 19 nt, Artificial Sequence
  Synthetic
gggugccaacucaugcuaa

SEQ ID NO: 1221 - RNA, 19 nt, Artificial Sequence
  Synthetic
acgcagcaguugcaaacau

SEQ ID NO: 1222 - RNA, 19 nt, Artificial Sequence
  Synthetic
uuuugaagagagaccgucg

SEQ ID NO: 1223 - RNA, 19 nt, Artificial Sequence
  Synthetic
gggggcugaggggcaacga

SEQ ID NO: 1224 - RNA, 19 nt, Artificial Sequence
  Synthetic
aagaaaaaaaauaacacag

SEQ ID NO: 1225 - RNA, 19 nt, Artificial Sequence
  Synthetic
gagagacagacuugagaac

SEQ ID NO: 1226 - RNA, 19 nt, Artificial Sequence
  Synthetic
cuugacaaguugcgacgga

SEQ ID NO: 1227 - RNA, 19 nt, Artificial Sequence
  Synthetic
agagaaaaaagaagugucc

SEQ ID NO: 1228 - RNA, 19 nt, Artificial Sequence
  Synthetic
cgagaacuaaagccaaggg

SEQ ID NO: 1229 - RNA, 19 nt, Artificial Sequence
  Synthetic
guauccaaguuggacuggg

SEQ ID NO: 1230 - RNA, 19 nt, Artificial Sequence
  Synthetic
guucggucugacggcgccc

SEQ ID NO: 1231 - RNA, 19 nt, Artificial Sequence
  Synthetic
cccagugugcacgaguggg

SEQ ID NO: 1232 - RNA, 19 nt, Artificial Sequence
  Synthetic
gaaggacuuggucgcgccc

SEQ ID NO: 1233 - RNA, 19 nt, Artificial Sequence
  Synthetic
cucccuuggcguggagcca

SEQ ID NO: 1234 - RNA, 19 nt, Artificial Sequence
  Synthetic
agggagcggccgccugcgg

SEQ ID NO: 1235 - RNA, 19 nt, Artificial Sequence
  Synthetic
ggcugccccgcuuugcgga

SEQ ID NO: 1236 - RNA, 19 nt, Artificial Sequence
  Synthetic
acgggcuguccccgcgcga

SEQ ID NO: 1237 - RNA, 19 nt, Artificial Sequence
  Synthetic
aacggaacguuggacuuuc

SEQ ID NO: 1238 - RNA, 19 nt, Artificial Sequence
  Synthetic
cguuaacauugaccaagaa

SEQ ID NO: 1239 - RNA, 19 nt, Artificial Sequence
  Synthetic
acugcauggaccuaacauu

SEQ ID NO: 1240 - RNA, 19 nt, Artificial Sequence
  Synthetic
ucgaucucauucaguauua

SEQ ID NO: 1241 - RNA, 19 nt, Artificial Sequence
  Synthetic
aaaggggggagggggaggg

SEQ ID NO: 1242 - RNA, 19 nt, Artificial Sequence
  Synthetic
ggguuacaaacugcaauag

SEQ ID NO: 1243 - RNA, 19 nt, Artificial Sequence
  Synthetic
gagacuguagauugcuucu

SEQ ID NO: 1244 - RNA, 19 nt, Artificial Sequence
  Synthetic
uguaguacuccuuaagaac

SEQ ID NO: 1245 - RNA, 19 nt, Artificial Sequence
  Synthetic
cacaaagcggggggagggu

SEQ ID NO: 1246 - RNA, 19 nt, Artificial Sequence
  Synthetic
uuggggaggggcggcagga

SEQ ID NO: 1247 - RNA, 19 nt, Artificial Sequence
  Synthetic
agggagguuugugagagcg

SEQ ID NO: 1248 - RNA, 19 nt, Artificial Sequence
  Synthetic
gaggcugagccuacagaug

SEQ ID NO: 1249 - RNA, 19 nt, Artificial Sequence
  Synthetic
gaacucuuucuggccugcu

SEQ ID NO: 1250 - RNA, 19 nt, Artificial Sequence
  Synthetic
uuucguuaacuguguaugu

SEQ ID NO: 1251 - RNA, 19 nt, Artificial Sequence
  Synthetic
uacauauauauauuuuuua

SEQ ID NO: 1252 - RNA, 19 nt, Artificial Sequence
  Synthetic
aauuugauuaaagcugauu

SEQ ID NO: 1253 - RNA, 19 nt, Artificial Sequence
  Synthetic
uacugucaauaaacagcuu

SEQ ID NO: 1254 - RNA, 19 nt, Artificial Sequence
  Synthetic
ucaugccuuuguaaguuau

SEQ ID NO: 1255 - RNA, 19 nt, Artificial Sequence
  Synthetic
uuucuuguuuguuuguuug

SEQ ID NO: 1256 - RNA, 19 nt, Artificial Sequence
  Synthetic
ggguauccugcccaguguu

SEQ ID NO: 1257 - RNA, 19 nt, Artificial Sequence
  Synthetic
uguuuguaaauaagagauu

SEQ ID NO: 1258 - RNA, 19 nt, Artificial Sequence
  Synthetic
uuggagcacucugaguuua

SEQ ID NO: 1259 - RNA, 19 nt, Artificial Sequence
  Synthetic
accauuuguaauaaaguau

SEQ ID NO: 1260 - RNA, 19 nt, Artificial Sequence
  Synthetic
uauaauuuuuuuauguuuu

SEQ ID NO: 1261 - RNA, 19 nt, Artificial Sequence
  Synthetic
uguuucugaaaauuccaga

SEQ ID NO: 1262 - RNA, 19 nt, Artificial Sequence
  Synthetic
aaaggauauuuaagaaaau

SEQ ID NO: 1263 - RNA, 19 nt, Artificial Sequence
  Synthetic
uacaauaaacuauuggaaa

SEQ ID NO: 1264 - RNA, 19 nt, Artificial Sequence
  Synthetic
aguacuccccuaaccucuu

SEQ ID NO: 1265 - RNA, 19 nt, Artificial Sequence
  Synthetic
uuucugcaucaucuguaga

SEQ ID NO: 1266 - RNA, 19 nt, Artificial Sequence
  Synthetic
auccuagucuaucuaggug

SEQ ID NO: 1267 - RNA, 19 nt, Artificial Sequence
  Synthetic
ggaguugaaagaguuaaga

SEQ ID NO: 1268 - RNA, 19 nt, Artificial Sequence
  Synthetic
aaugcucgauaaaaucacu

SEQ ID NO: 1269 - RNA, 19 nt, Artificial Sequence
  Synthetic
ucucagugcuucuuacuau

SEQ ID NO: 1270 - RNA, 19 nt, Artificial Sequence
  Synthetic
uuaagcaguaaaaacuguu

SEQ ID NO: 1271 - RNA, 19 nt, Artificial Sequence
  Synthetic
ucucuauuagacuuagaaa

SEQ ID NO: 1272 - RNA, 19 nt, Artificial Sequence
  Synthetic
auaaauguaccugauguac

SEQ ID NO: 1273 - RNA, 19 nt, Artificial Sequence
  Synthetic
ccugaugcuaugucaggcu

SEQ ID NO: 1274 - RNA, 19 nt, Artificial Sequence
  Synthetic
uucauacuccacgcucccc

SEQ ID NO: 1275 - RNA, 19 nt, Artificial Sequence
  Synthetic
ccagcguaucuauauggaa

SEQ ID NO: 1276 - RNA, 19 nt, Artificial Sequence
  Synthetic
auugcuuaccaaaggcuag

SEQ ID NO: 1277 - RNA, 19 nt, Artificial Sequence
  Synthetic
gugcgauguuucaggaggc

SEQ ID NO: 1278 - RNA, 19 nt, Artificial Sequence
  Synthetic
cuggaggaagggggguugc

SEQ ID NO: 1279 - RNA, 19 nt, Artificial Sequence
  Synthetic
caguggagagggacagccc

SEQ ID NO: 1280 - RNA, 19 nt, Artificial Sequence
  Synthetic
cacugagaagucaaacauu

SEQ ID NO: 1281 - RNA, 19 nt, Artificial Sequence
  Synthetic
uucaaaguuuggauugcau

SEQ ID NO: 1282 - RNA, 19 nt, Artificial Sequence
  Synthetic
ucaaguggcaugugcugug

SEQ ID NO: 1283 - RNA, 19 nt, Artificial Sequence
  Synthetic
gaccauuuauaauguuaga

SEQ ID NO: 1284 - RNA, 19 nt, Artificial Sequence
  Synthetic
aaauuuuacaauaggugcu

SEQ ID NO: 1285 - RNA, 19 nt, Artificial Sequence
  Synthetic
uuauucucaaagcaggaau

SEQ ID NO: 1286 - RNA, 19 nt, Artificial Sequence
  Synthetic
uugguggcagauuuuacaa

SEQ ID NO: 1287 - RNA, 19 nt, Artificial Sequence
  Synthetic
aaagauguauccuuccaau

SEQ ID NO: 1288 - RNA, 19 nt, Artificial Sequence
  Synthetic
uuuggaaucuucucuuuga

SEQ ID NO: 1289 - RNA, 19 nt, Artificial Sequence
  Synthetic
acaauuccuagauaaaaag

SEQ ID NO: 1290 - RNA, 19 nt, Artificial Sequence
  Synthetic
gauggccuuugucuuauga

SEQ ID NO: 1291 - RNA, 19 nt, Artificial Sequence
  Synthetic
aauauuuauaacagcauuc

SEQ ID NO: 1292 - RNA, 19 nt, Artificial Sequence
  Synthetic
cugucacaauaaauguauu

SEQ ID NO: 1293 - RNA, 19 nt, Artificial Sequence
  Synthetic
uaaauguauucaaauacca

SEQ ID NO: 1294 - RNA, 19 nt, Artificial Sequence
  Synthetic
agccacacucagugcaacu

SEQ ID NO: 1295 - RNA, 19 nt, Artificial Sequence
  Synthetic
cucccgccucgcugcuuca

SEQ ID NO: 1296 - RNA, 19 nt, Artificial Sequence
  Synthetic
ugacuccgcgcaccuccac

SEQ ID NO: 1297 - RNA, 19 nt, Artificial Sequence
  Synthetic
ugugucugucugucugccu

SEQ ID NO: 1298 - RNA, 19 nt, Artificial Sequence
  Synthetic
ccgaccuggcuggcuggcu

SEQ ID NO: 1299 - RNA, 19 nt, Artificial Sequence
  Synthetic
gcaguucggacuauacugc

SEQ ID NO: 1300 - RNA, 19 nt, Artificial Sequence
  Synthetic
gaaaagaaaauaagauuug

SEQ ID NO: 1301 - RNA, 19 nt, Artificial Sequence
  Synthetic
ggcaguuagagagaaggug

SEQ ID NO: 1302 - RNA, 19 nt, Artificial Sequence
  Synthetic
ccacaggcgcuagcucugg

SEQ ID NO: 1303 - RNA, 19 nt, Artificial Sequence
  Synthetic
gaaccaccagcccgggagc

SEQ ID NO: 1304 - RNA, 19 nt, Artificial Sequence
  Synthetic
ggcucucuggacacucccg

SEQ ID NO: 1305 - RNA, 19 nt, Artificial Sequence
  Synthetic
ggggccggcuggagacaag

SEQ ID NO: 1306 - RNA, 19 nt, Artificial Sequence
  Synthetic
cagcagggcucuccucccg

SEQ ID NO: 1307 - RNA, 19 nt, Artificial Sequence
  Synthetic
cugucaacagcgccugggc

SEQ ID NO: 1308 - RNA, 19 nt, Artificial Sequence
  Synthetic
uaccgcugcuuuccgccgc

SEQ ID NO: 1309 - RNA, 19 nt, Artificial Sequence
  Synthetic
cccggcgggcgcguggggu

SEQ ID NO: 1310 - RNA, 19 nt, Artificial Sequence
  Synthetic
agccgcucgccgacguccc

SEQ ID NO: 1311 - RNA, 19 nt, Artificial Sequence
  Synthetic
aaaguucuuugcugcugca

SEQ ID NO: 1312 - RNA, 19 nt, Artificial Sequence
  Synthetic
ccgguccuccccgccggga

SEQ ID NO: 1313 - RNA, 19 nt, Artificial Sequence
  Synthetic
ggacucugccacuugucuc

SEQ ID NO: 1314 - RNA, 19 nt, Artificial Sequence
  Synthetic
uugcaaaaguucgcuccgg

SEQ ID NO: 1315 - RNA, 19 nt, Artificial Sequence
  Synthetic
cuaagacgcaggaaaggcu

SEQ ID NO: 1316 - RNA, 19 nt, Artificial Sequence
  Synthetic
uuaccgccguggagaagcc

SEQ ID NO: 1317 - RNA, 19 nt, Artificial Sequence
  Synthetic
uccgccgccuucuggucuu

SEQ ID NO: 1318 - RNA, 19 nt, Artificial Sequence
  Synthetic
ucuucucuugcguggcucu

SEQ ID NO: 1319 - RNA, 19 nt, Artificial Sequence
  Synthetic
aagcugagcgcacguccuu

SEQ ID NO: 1320 - RNA, 19 nt, Artificial Sequence
  Synthetic
caacaaccggugcgagcga

SEQ ID NO: 1321 - RNA, 19 nt, Artificial Sequence
  Synthetic
cucgcgcucgcccaaguuc

SEQ ID NO: 1322 - RNA, 19 nt, Artificial Sequence
  Synthetic
ggcgcccggcagccgcggc

SEQ ID NO: 1323 - RNA, 19 nt, Artificial Sequence
  Synthetic
ccgcugcuagggggagggg

SEQ ID NO: 1324 - RNA, 19 nt, Artificial Sequence
  Synthetic
gacgacuuguccccuccuc

SEQ ID NO: 1325 - RNA, 19 nt, Artificial Sequence
  Synthetic
cuuggccgcccggacuccg

SEQ ID NO: 1326 - RNA, 19 nt, Artificial Sequence
  Synthetic
ggccggccggcggcggguc

SEQ ID NO: 1327 - RNA, 19 nt, Artificial Sequence
  Synthetic
cagugcggacccugcagug

SEQ ID NO: 1328 - RNA, 19 nt, Artificial Sequence
  Synthetic
ucuccccgcggagcggauc

SEQ ID NO: 1329 - RNA, 19 nt, Artificial Sequence
  Synthetic
acuucccagagcagcggcu

SEQ ID NO: 1330 - RNA, 19 nt, Artificial Sequence
  Synthetic
gaguccgcaggcgaacuca

SEQ ID NO: 1331 - RNA, 19 nt, Artificial Sequence
  Synthetic
gggcgcagcgguuccucgg

SEQ ID NO: 1332 - RNA, 19 nt, Artificial Sequence
  Synthetic
acucacugagcgcucuucg

SEQ ID NO: 1333 - RNA, 19 nt, Artificial Sequence
  Synthetic
cuuugaaaagucgcgguca

SEQ ID NO: 1334 - RNA, 19 nt, Artificial Sequence
  Synthetic
cucgcgcgcgcuacccggc

SEQ ID NO: 1335 - RNA, 19 nt, Artificial Sequence
  Synthetic
cgcacucuuacuugucgac

SEQ ID NO: 1336 - RNA, 19 nt, Artificial Sequence
  Synthetic
guuaauuaagaugccuccc

SEQ ID NO: 1337 - RNA, 19 nt, Artificial Sequence
  Synthetic
cgcuccagggagcgcaggg

SEQ ID NO: 1338 - RNA, 19 nt, Artificial Sequence
  Synthetic
gcgcccuccucaccagcuc

SEQ ID NO: 1339 - RNA, 19 nt, Artificial Sequence
  Synthetic
cuggcugucguccccgcug

SEQ ID NO: 1340 - RNA, 19 nt, Artificial Sequence
  Synthetic
uaagagcgcacgcacccgc

SEQ ID NO: 1341 - RNA, 19 nt, Artificial Sequence
  Synthetic
ugacagggaaaguuucucu

SEQ ID NO: 1342 - RNA, 19 nt, Artificial Sequence
  Synthetic
cgcgccccccggagccuuu

SEQ ID NO: 1343 - RNA, 19 nt, Artificial Sequence
  Synthetic
uggcaagcgggggacaccc

SEQ ID NO: 1344 - RNA, 19 nt, Artificial Sequence
  Synthetic
ggggccgcaacagggcucu

SEQ ID NO: 1345 - RNA, 19 nt, Artificial Sequence
  Synthetic
cgugcgcgcacaaguuucg

SEQ ID NO: 1346 - RNA, 19 nt, Artificial Sequence
  Synthetic
cacgugagguuaguuuggc

SEQ ID NO: 1347 - RNA, 19 nt, Artificial Sequence
  Synthetic
uagaacaguccgucacuuc

SEQ ID NO: 1348 - RNA, 19 nt, Artificial Sequence
  Synthetic
uuuccaucuuugcagucau

SEQ ID NO: 1349 - RNA, 19 nt, Artificial Sequence
  Synthetic
caucgucauagaaggucgu

SEQ ID NO: 1350 - RNA, 19 nt, Artificial Sequence
  Synthetic
ggaacgaggcguugagggc

SEQ ID NO: 1351 - RNA, 19 nt, Artificial Sequence
  Synthetic
guccgcucucggacgggag

SEQ ID NO: 1352 - RNA, 19 nt, Artificial Sequence
  Synthetic
gguuacuguagccauaagg

SEQ ID NO: 1353 - RNA, 19 nt, Artificial Sequence
  Synthetic
ucuguuucaggaucuuggg

SEQ ID NO: 1354 - RNA, 19 nt, Artificial Sequence
  Synthetic
ccagguucagggucaugcu

SEQ ID NO: 1355 - RNA, 19 nt, Artificial Sequence
  Synthetic
ggcuccccacugggucggc

SEQ ID NO: 1356 - RNA, 19 nt, Artificial Sequence
  Synthetic
cgcggaggugcggcuucag

SEQ ID NO: 1357 - RNA, 19 nt, Artificial Sequence
  Synthetic
ggagguccgaguucuuggc

SEQ ID NO: 1358 - RNA, 19 nt, Artificial Sequence
  Synthetic
ccacgucgggcgaggugag

SEQ ID NO: 1359 - RNA, 19 nt, Artificial Sequence
  Synthetic
acgccagcuugagcagccc

SEQ ID NO: 1360 - RNA, 19 nt, Artificial Sequence
  Synthetic
ggcgcuccagcucgggcga

SEQ ID NO: 1361 - RNA, 19 nt, Artificial Sequence
  Synthetic
ugcuggacuggauuaucag

SEQ ID NO: 1362 - RNA, 19 nt, Artificial Sequence
  Synthetic
ugguggugaugugcccguu

SEQ ID NO: 1363 - RNA, 19 nt, Artificial Sequence
  Synthetic
acugggugggggucggcgu

SEQ ID NO: 1364 - RNA, 19 nt, Artificial Sequence
  Synthetic
cguucuuggggcacaggaa

SEQ ID NO: 1365 - RNA, 19 nt, Artificial Sequence
  Synthetic
ccuccugcucaucugucac

SEQ ID NO: 1366 - RNA, 19 nt, Artificial Sequence
  Synthetic
cgaagcccucggcgaaccc

SEQ ID NO: 1367 - RNA, 19 nt, Artificial Sequence
  Synthetic
guucggccagggcgcgcac

SEQ ID NO: 1368 - RNA, 19 nt, Artificial Sequence
  Synthetic
gcguguucuggcugugcag

SEQ ID NO: 1369 - RNA, 19 nt, Artificial Sequence
  Synthetic
ccgacgugacgcugggcag

SEQ ID NO: 1370 - RNA, 19 nt, Artificial Sequence
  Synthetic
cguugaccggcugcgccgc

SEQ ID NO: 1371 - RNA, 19 nt, Artificial Sequence
  Synthetic
gagccaccaugccugcccc

SEQ ID NO: 1372 - RNA, 19 nt, Artificial Sequence
  Synthetic
ccaccgaggcuaccgcggg

SEQ ID NO: 1373 - RNA, 19 nt, Artificial Sequence
  Synthetic
cgcugccgcugcccccugc

SEQ ID NO: 1374 - RNA, 19 nt, Artificial Sequence
  Synthetic
ggcuggcgcugaagccgcc

SEQ ID NO: 1375 - RNA, 19 nt, Artificial Sequence
  Synthetic
ccggcggcucgcugugcag

SEQ ID NO: 1376 - RNA, 19 nt, Artificial Sequence
  Synthetic
ugcugagguuugcguagac

SEQ ID NO: 1377 - RNA, 19 nt, Artificial Sequence
  Synthetic
gcgcgccuggguugaaguu

SEQ ID NO: 1378 - RNA, 19 nt, Artificial Sequence
  Synthetic
ccccgccgccgcugcucag

SEQ ID NO: 1379 - RNA, 19 nt, Artificial Sequence
  Synthetic
ccgcgccguaggagggcgc

SEQ ID NO: 1380 - RNA, 19 nt, Artificial Sequence
  Synthetic
cgggaaaggccaggccggc

SEQ ID NO: 1381 - RNA, 19 nt, Artificial Sequence
  Synthetic
gcugcugcugggguugcgc

SEQ ID NO: 1382 - RNA, 19 nt, Artificial Sequence
  Synthetic
gguggugcggcggcugcug

SEQ ID NO: 1383 - RNA, 19 nt, Artificial Sequence
  Synthetic
cgggcaucugcuggggcag

SEQ ID NO: 1384 - RNA, 19 nt, Artificial Sequence
  Synthetic
gcagccgcgggugcugcac

SEQ ID NO: 1385 - RNA, 19 nt, Artificial Sequence
  Synthetic
gcuccuccuucagggccug

SEQ ID NO: 1386 - RNA, 19 nt, Artificial Sequence
  Synthetic
ucucgggcacugucugagg

SEQ ID NO: 1387 - RNA, 19 nt, Artificial Sequence
  Synthetic
gcggugucucgccgggcau

SEQ ID NO: 1388 - RNA, 19 nt, Artificial Sequence
  Synthetic
ugucgaugggggacagggg

SEQ ID NO: 1389 - RNA, 19 nt, Artificial Sequence
  Synthetic
uccgcuccugggacuccau

SEQ ID NO: 1390 - RNA, 19 nt, Artificial Sequence
  Synthetic
gcuuccucuccgccuugau

SEQ ID NO: 1391 - RNA, 19 nt, Artificial Sequence
  Synthetic
cgaugcgguuccucaugcg

SEQ ID NO: 1392 - RNA, 19 nt, Artificial Sequence
  Synthetic
uucggcacuuggaggcagc

SEQ ID NO: 1393 - RNA, 19 nt, Artificial Sequence
  Synthetic
uucucuccagcuuccuuuu

SEQ ID NO: 1394 - RNA, 19 nt, Artificial Sequence
  Synthetic
uuuccuccagccgggcgau

SEQ ID NO: 1395 - RNA, 19 nt, Artificial Sequence
  Synthetic
cuuucaagguuuucacuuu

SEQ ID NO: 1396 - RNA, 19 nt, Artificial Sequence
  Synthetic
ccagcuccgaguucugagc

SEQ ID NO: 1397 - RNA, 19 nt, Artificial Sequence
  Synthetic
gcauguuggccguggacgc

SEQ ID NO: 1398 - RNA, 19 nt, Artificial Sequence
  Synthetic
gugccaccuguucccugag

SEQ ID NO: 1399 - RNA, 19 nt, Artificial Sequence
  Synthetic
ugacuuucuguuuaagcug

SEQ ID NO: 1400 - RNA, 19 nt, Artificial Sequence
  Synthetic
cacuguuaacgugguucau

SEQ ID NO: 1401 - RNA, 19 nt, Artificial Sequence
  Synthetic
uuagcaugaguuggcaccc

SEQ ID NO: 1402 - RNA, 19 nt, Artificial Sequence
  Synthetic
auguuugcaacugcugcgu

SEQ ID NO: 1403 - RNA, 19 nt, Artificial Sequence
  Synthetic
cgacggucucucuucaaaa

SEQ ID NO: 1404 - RNA, 19 nt, Artificial Sequence
  Synthetic
ucguugccccucagccccc

SEQ ID NO: 1405 - RNA, 19 nt, Artificial Sequence
  Synthetic
cuguguuauuuuuuuucuu

SEQ ID NO: 1406 - RNA, 19 nt, Artificial Sequence
  Synthetic
guucucaagucugucucuc

SEQ ID NO: 1407 - RNA, 19 nt, Artificial Sequence
  Synthetic
uccgucgcaacuugucaag

SEQ ID NO: 1408 - RNA, 19 nt, Artificial Sequence
  Synthetic
ggacacuucuuuuuucucu

SEQ ID NO: 1409 - RNA, 19 nt, Artificial Sequence
  Synthetic
cccuuggcuuuaguucucg

SEQ ID NO: 1410 - RNA, 19 nt, Artificial Sequence
  Synthetic
cccaguccaacuuggauac

SEQ ID NO: 1411 - RNA, 19 nt, Artificial Sequence
  Synthetic
gggcgccgucagaccgaac

SEQ ID NO: 1412 - RNA, 19 nt, Artificial Sequence
  Synthetic
cccacucgugcacacuggg

SEQ ID NO: 1413 - RNA, 19 nt, Artificial Sequence
  Synthetic
gggcgcgaccaaguccuuc

SEQ ID NO: 1414 - RNA, 19 nt, Artificial Sequence
  Synthetic
uggcuccacgccaagggag

SEQ ID NO: 1415 - RNA, 19 nt, Artificial Sequence
  Synthetic
ccgcaggcggccgcucccu

SEQ ID NO: 1416 - RNA, 19 nt, Artificial Sequence
  Synthetic
uccgcaaagcggggcagcc

SEQ ID NO: 1417 - RNA, 19 nt, Artificial Sequence
  Synthetic
ucgcgcggggacagcccgu

SEQ ID NO: 1418 - RNA, 19 nt, Artificial Sequence
  Synthetic
gaaaguccaacguuccguu

SEQ ID NO: 1419 - RNA, 19 nt, Artificial Sequence
  Synthetic
uucuuggucaauguuaacg

SEQ ID NO: 1420 - RNA, 19 nt, Artificial Sequence
  Synthetic
aauguuagguccaugcagu

SEQ ID NO: 1421 - RNA, 19 nt, Artificial Sequence
  Synthetic
uaauacugaaugagaucga

SEQ ID NO: 1422 - RNA, 19 nt, Artificial Sequence
  Synthetic
cccucccccuccccccuuu

SEQ ID NO: 1423 - RNA, 19 nt, Artificial Sequence
  Synthetic
cuauugcaguuuguaaccc

SEQ ID NO: 1424 - RNA, 19 nt, Artificial Sequence
  Synthetic
agaagcaaucuacagucuc

SEQ ID NO: 1425 - RNA, 19 nt, Artificial Sequence
  Synthetic
guucuuaaggaguacuaca

SEQ ID NO: 1426 - RNA, 19 nt, Artificial Sequence
  Synthetic
acccuccccccgcuuugug

SEQ ID NO: 1427 - RNA, 19 nt, Artificial Sequence
  Synthetic
uccugccgccccuccccaa

SEQ ID NO: 1428 - RNA, 19 nt, Artificial Sequence
  Synthetic
cgcucucacaaaccucccu

SEQ ID NO: 1429 - RNA, 19 nt, Artificial Sequence
  Synthetic
caucuguaggcucagccuc

SEQ ID NO: 1430 - RNA, 19 nt, Artificial Sequence
  Synthetic
agcaggccagaaagaguuc

SEQ ID NO: 1431 - RNA, 19 nt, Artificial Sequence
  Synthetic
acauacacaguuaacgaaa

SEQ ID NO: 1432 - RNA, 19 nt, Artificial Sequence
  Synthetic
uaaaaaauauauauaugua

SEQ ID NO: 1433 - RNA, 19 nt, Artificial Sequence
  Synthetic
aaucagcuuuaaucaaauu

SEQ ID NO: 1434 - RNA, 19 nt, Artificial Sequence
  Synthetic
aagcuguuuauugacagua

SEQ ID NO: 1435 - RNA, 19 nt, Artificial Sequence
  Synthetic
auaacuuacaaaggcauga

SEQ ID NO: 1436 - RNA, 19 nt, Artificial Sequence
  Synthetic
caaacaaacaaacaagaaa

SEQ ID NO: 1437 - RNA, 19 nt, Artificial Sequence
  Synthetic
aacacugggcaggauaccc

SEQ ID NO: 1438 - RNA, 19 nt, Artificial Sequence
  Synthetic
aaucucuuauuuacaaaca

SEQ ID NO: 1439 - RNA, 19 nt, Artificial Sequence
  Synthetic
uaaacucagagugcuccaa

SEQ ID NO: 1440 - RNA, 19 nt, Artificial Sequence
  Synthetic
auacuuuauuacaaauggu

SEQ ID NO: 1441 - RNA, 19 nt, Artificial Sequence
  Synthetic
aaaacauaaaaaaauuaua

SEQ ID NO: 1442 - RNA, 19 nt, Artificial Sequence
  Synthetic
ucuggaauuuucagaaaca

SEQ ID NO: 1443 - RNA, 19 nt, Artificial Sequence
  Synthetic
auuuucuuaaauauccuuu

SEQ ID NO: 1444 - RNA, 19 nt, Artificial Sequence
  Synthetic
uuuccaauaguuuauugua

SEQ ID NO: 1445 - RNA, 19 nt, Artificial Sequence
  Synthetic
aagagguuaggggaguacu

SEQ ID NO: 1446 - RNA, 19 nt, Artificial Sequence
  Synthetic
ucuacagaugaugcagaaa

SEQ ID NO: 1447 - RNA, 19 nt, Artificial Sequence
  Synthetic
caccuagauagacuaggau

SEQ ID NO: 1448 - RNA, 19 nt, Artificial Sequence
  Synthetic
ucuuaacucuuucaacucc

SEQ ID NO: 1449 - RNA, 19 nt, Artificial Sequence
  Synthetic
agugauuuuaucgagcauu

SEQ ID NO: 1450 - RNA, 19 nt, Artificial Sequence
  Synthetic
auaguaagaagcacugaga

SEQ ID NO: 1451 - RNA, 19 nt, Artificial Sequence
  Synthetic
aacaguuuuuacugcuuaa

SEQ ID NO: 1452 - RNA, 19 nt, Artificial Sequence
  Synthetic
uuucuaagucuaauagaga

SEQ ID NO: 1453 - RNA, 19 nt, Artificial Sequence
  Synthetic
guacaucagguacauuuau

SEQ ID NO: 1454 - RNA, 19 nt, Artificial Sequence
  Synthetic
agccugacauagcaucagg

SEQ ID NO: 1455 - RNA, 19 nt, Artificial Sequence
  Synthetic
ggggagcguggaguaugaa

SEQ ID NO: 1456 - RNA, 19 nt, Artificial Sequence
  Synthetic
uuccauauagauacgcugg

SEQ ID NO: 1457 - RNA, 19 nt, Artificial Sequence
  Synthetic
cuagccuuugguaagcaau

SEQ ID NO: 1458 - RNA, 19 nt, Artificial Sequence
  Synthetic
gccuccugaaacaucgcac

SEQ ID NO: 1459 - RNA, 19 nt, Artificial Sequence
  Synthetic
gcaaccccccuuccuccag

SEQ ID NO: 1460 - RNA, 19 nt, Artificial Sequence
  Synthetic
gggcugucccucuccacug

SEQ ID NO: 1461 - RNA, 19 nt, Artificial Sequence
  Synthetic
aauguuugacuucucagug

SEQ ID NO: 1462 - RNA, 19 nt, Artificial Sequence
  Synthetic
augcaauccaaacuuugaa

SEQ ID NO: 1463 - RNA, 19 nt, Artificial Sequence
  Synthetic
cacagcacaugccacuuga

SEQ ID NO: 1464 - RNA, 19 nt, Artificial Sequence
  Synthetic
ucuaacauuauaaaugguc

SEQ ID NO: 1465 - RNA, 19 nt, Artificial Sequence
  Synthetic
agcaccuauuguaaaauuu

SEQ ID NO: 1466 - RNA, 19 nt, Artificial Sequence
  Synthetic
auuccugcuuugagaauaa

SEQ ID NO: 1467 - RNA, 19 nt, Artificial Sequence
  Synthetic
uuguaaaaucugccaccaa

SEQ ID NO: 1468 - RNA, 19 nt, Artificial Sequence
  Synthetic
auuggaaggauacaucuuu

SEQ ID NO: 1469 - RNA, 19 nt, Artificial Sequence
  Synthetic
ucaaagagaagauuccaaa

SEQ ID NO: 1470 - RNA, 19 nt, Artificial Sequence
  Synthetic
cuuuuuaucuaggaauugu

SEQ ID NO: 1471 - RNA, 19 nt, Artificial Sequence
  Synthetic
ucauaagacaaaggccauc

SEQ ID NO: 1472 - RNA, 19 nt, Artificial Sequence
  Synthetic
gaaugcuguuauaaauauu

SEQ ID NO: 1473 - RNA, 19 nt, Artificial Sequence
  Synthetic
aauacauuuauugugacag

SEQ ID NO: 1474 - RNA, 19 nt, Artificial Sequence
  Synthetic
ugguauuugaauacauuua

SEQ ID NO: 1475 - RNA, 23 nt, Artificial Sequence
  Synthetic
accagaccuacugccagagaacc

SEQ ID NO: 1476 - RNA, 23 nt, Artificial Sequence
  Synthetic
uugaagacacaacaccucagcaa

SEQ ID NO: 1477 - RNA, 23 nt, Artificial Sequence
  Synthetic
aucacacaggguuccugacagaa

SEQ ID NO: 1478 - RNA, 23 nt, Artificial Sequence
  Synthetic
uuggcucuagucacuggcaucuc

SEQ ID NO: 1479 - RNA, 23 nt, Artificial Sequence
  Synthetic
auuggcccagcuuuuagaaaaug

SEQ ID NO: 1480 - RNA, 23 nt, Artificial Sequence
  Synthetic
acuguggaguugacucgguguuc

SEQ ID NO: 1481 - RNA, 23 nt, Artificial Sequence
  Synthetic
uguggugagaaauuugccuuguu

SEQ ID NO: 1482 - RNA, 23 nt, Artificial Sequence
  Synthetic
ccucgcaugacuguuacagcuuu

SEQ ID NO: 1483 - RNA, 23 nt, Artificial Sequence
  Synthetic
ccuucgaacaucagaccuacugc

SEQ ID NO: 1484 - RNA, 23 nt, Artificial Sequence
  Synthetic
ugaacuccaagggcuauaccaag

SEQ ID NO: 1485 - RNA, 23 nt, Artificial Sequence
  Synthetic
caagggcuauaccaaguccaucg

SEQ ID NO: 1486 - RNA, 23 nt, Artificial Sequence
  Synthetic
agggcuauaccaaguccaucgac

SEQ ID NO: 1487 - RNA, 23 nt, Artificial Sequence
  Synthetic
accuggagcaguacuaugacccg

SEQ ID NO: 1488 - RNA, 23 nt, Artificial Sequence
  Synthetic
cucccgccagacuguuagaaaau

SEQ ID NO: 1489 - RNA, 23 nt, Artificial Sequence
  Synthetic
uucuguguguggugagcagaagu

SEQ ID NO: 1490 - RNA, 23 nt, Artificial Sequence
  Synthetic
guguguggugagcagaaguggag

SEQ ID NO: 1491 - RNA, 23 nt, Artificial Sequence
  Synthetic
gaagcaagcgugacaacaauuuu

SEQ ID NO: 1492 - RNA, 23 nt, Artificial Sequence
  Synthetic
aacagcuuggaacaccauguccu

SEQ ID NO: 1493 - RNA, 23 nt, Artificial Sequence
  Synthetic
cuuuucccagcugacucagaaca

SEQ ID NO: 1494 - RNA, 23 nt, Artificial Sequence
  Synthetic
uuuucccagcugacucagaacac

SEQ ID NO: 1495 - RNA, 23 nt, Artificial Sequence
  Synthetic
caaacuuaaagccagucaggcaa

SEQ ID NO: 1496 - RNA, 23 nt, Artificial Sequence
  Synthetic
aggcaagggauuuguuauccaaa

SEQ ID NO: 1497 - RNA, 23 nt, Artificial Sequence
  Synthetic
caaugucaacagauccgacuuug

SEQ ID NO: 1498 - RNA, 23 nt, Artificial Sequence
  Synthetic
cuuuggccucugauacagacagc

SEQ ID NO: 1499 - RNA, 23 nt, Artificial Sequence
  Synthetic
gccuacuuugcucaguaccacga

SEQ ID NO: 1500 - RNA, 23 nt, Artificial Sequence
  Synthetic
ugucugucuuugugggaggguaa

SEQ ID NO: 1501 - RNA, 23 nt, Artificial Sequence
  Synthetic
accaacuggcuucugugcacuag

SEQ ID NO: 1502 - RNA, 23 nt, Artificial Sequence
  Synthetic
agcagagugaggauguguuuugc

SEQ ID NO: 1503 - RNA, 23 nt, Artificial Sequence
  Synthetic
aucccaugucaccucagcugaua

SEQ ID NO: 1504 - RNA, 23 nt, Artificial Sequence
  Synthetic
aaaagggucuucuuggcagcuua

SEQ ID NO: 1505 - RNA, 23 nt, Artificial Sequence
  Synthetic
ggacucuaagcuggagcucuugg

SEQ ID NO: 1506 - RNA, 23 nt, Artificial Sequence
  Synthetic
uuggcuguaaucaguuaugccgu

SEQ ID NO: 1507 - RNA, 23 nt, Artificial Sequence
  Synthetic
agugaccgcgacuuuucaaagcc

SEQ ID NO: 1508 - RNA, 23 nt, Artificial Sequence
  Synthetic
caaaccucagcaacuucaaccca

SEQ ID NO: 1509 - RNA, 23 nt, Artificial Sequence
  Synthetic
aaaccucagcaacuucaacccag

SEQ ID NO: 1510 - RNA, 23 nt, Artificial Sequence
  Synthetic
aggaaaaagugaaaaccuugaaa

SEQ ID NO: 1511 - RNA, 23 nt, Artificial Sequence
  Synthetic
ggaaaaagugaaaaccuugaaag

SEQ ID NO: 1512 - RNA, 23 nt, Artificial Sequence
  Synthetic
cucagggaacagguggcacagcu

SEQ ID NO: 1513 - RNA, 23 nt, Artificial Sequence
  Synthetic
acagaaagucaugaaccacguua

SEQ ID NO: 1514 - RNA, 23 nt, Artificial Sequence
  Synthetic
cagaaagucaugaaccacguuaa

SEQ ID NO: 1515 - RNA, 23 nt, Artificial Sequence
  Synthetic
gaaagucaugaaccacguuaaca

SEQ ID NO: 1516 - RNA, 23 nt, Artificial Sequence
  Synthetic
agucaugaaccacguuaacagug

SEQ ID NO: 1517 - RNA, 23 nt, Artificial Sequence
  Synthetic
acagugggugccaacucaugcua

SEQ ID NO: 1518 - RNA, 23 nt, Artificial Sequence
  Synthetic
ggugccaacucaugcuaacgcag

SEQ ID NO: 1519 - RNA, 23 nt, Artificial Sequence
  Synthetic
gugccaacucaugcuaacgcagc

SEQ ID NO: 1520 - RNA, 23 nt, Artificial Sequence
  Synthetic
gccaacucaugcuaacgcagcag

SEQ ID NO: 1521 - RNA, 23 nt, Artificial Sequence
  Synthetic
ccaacucaugcuaacgcagcagu

SEQ ID NO: 1522 - RNA, 23 nt, Artificial Sequence
  Synthetic
caacucaugcuaacgcagcaguu

SEQ ID NO: 1523 - RNA, 23 nt, Artificial Sequence
  Synthetic
aacauugaccaagaacugcaugg

SEQ ID NO: 1524 - RNA, 23 nt, Artificial Sequence
  Synthetic
acauugaccaagaacugcaugga

SEQ ID NO: 1525 - RNA, 23 nt, Artificial Sequence
  Synthetic
cauugaccaagaacugcauggac

SEQ ID NO: 1526 - RNA, 23 nt, Artificial Sequence
  Synthetic
auugaccaagaacugcauggacc

SEQ ID NO: 1527 - RNA, 23 nt, Artificial Sequence
  Synthetic
ugaccaagaacugcauggaccua

SEQ ID NO: 1528 - RNA, 23 nt, Artificial Sequence
  Synthetic
accaagaacugcauggaccuaac

SEQ ID NO: 1529 - RNA, 23 nt, Artificial Sequence
  Synthetic
caagaacugcauggaccuaacau

SEQ ID NO: 1530 - RNA, 23 nt, Artificial Sequence
  Synthetic
agaacugcauggaccuaacauuc

SEQ ID NO: 1531 - RNA, 23 nt, Artificial Sequence
  Synthetic
gaacugcauggaccuaacauucg

SEQ ID NO: 1532 - RNA, 23 nt, Artificial Sequence
  Synthetic
aacugcauggaccuaacauucga

SEQ ID NO: 1533 - RNA, 23 nt, Artificial Sequence
  Synthetic
cugcauggaccuaacauucgauc

SEQ ID NO: 1534 - RNA, 23 nt, Artificial Sequence
  Synthetic
gcauggaccuaacauucgaucuc

SEQ ID NO: 1535 - DNA, 21 bp, Artificial Sequence
  Synthetic
  misc_feature (1)..(19): ribonucleotide unmodified or modified as described for this sequence
cagaccuacugccagagaatt

SEQ ID NO: 1536 - DNA, 21 bp, Artificial Sequence
  Synthetic
  misc_feature (1)..(19): ribonucleotide unmodified or modified as described for this sequence
gaagacacaacaccucagctt

SEQ ID NO: 1537 - DNA, 21 bp, Artificial Sequence
  Synthetic
  misc_feature (1)..(19): ribonucleotide unmodified or modified as described for this sequence
cacacaggguuccugacagtt

SEQ ID NO: 1538 - DNA, 21 bp, Artificial Sequence
  Synthetic
  misc_feature (1)..(19): ribonucleotide unmodified or modified as described for this sequence
ggcucuagucacuggcauctt

SEQ ID NO: 1539 - DNA, 21 bp, Artificial Sequence
  Synthetic
  misc_feature (1)..(19): ribonucleotide unmodified or modified as described for this sequence
uggcccagcuuuuagaaaatt

SEQ ID NO: 1540 - DNA, 21 bp, Artificial Sequence
  Synthetic
  misc_feature (1)..(19): ribonucleotide unmodified or modified as described for this sequence
uguggaguugacucggugutt

SEQ ID NO: 1541 - DNA, 21 bp, Artificial Sequence
  Synthetic
  misc_feature (1)..(19): ribonucleotide unmodified or modified as described for this sequence
uggugagaaauuugccuugtt

SEQ ID NO: 1542 - DNA, 21 bp, Artificial Sequence
  Synthetic
  misc_feature (1)..(19): ribonucleotide unmodified or modified as described for this sequence
ucgcaugacuguuacagcutt

SEQ ID NO: 1543 - DNA, 21 bp, Artificial Sequence
  Synthetic
  misc_feature (1)..(19): ribonucleotide unmodified or modified as described for this sequence
uucucuggcaguaggucugtt

SEQ ID NO: 1544 - DNA, 21 bp, Artificial Sequence
  Synthetic
  misc_feature (1)..(19): ribonucleotide unmodified or modified as described for this sequence
gcugagguguugugucuuctt

SEQ ID NO: 1545 - DNA, 21 bp, Artificial Sequence
  Synthetic
  misc_feature (1)..(19): ribonucleotide unmodified or modified as described for this sequence
cugucaggaacccugugugtt

SEQ ID NO: 1546 - DNA, 21 bp, Artificial Sequence
  Synthetic
  misc_feature (1)..(19): ribonucleotide unmodified or modified as described for this sequence
gaugccagugacuagagcctt

SEQ ID NO: 1547 - DNA, 21 bp, Artificial Sequence
  Synthetic
  misc_feature (1)..(19): ribonucleotide unmodified or modified as described for this sequence
uuuucuaaaagcugggccatt

SEQ ID NO: 1548 - DNA, 21 bp, Artificial Sequence
  Synthetic
  misc_feature (1)..(19): ribonucleotide unmodified or modified as described for this sequence
acaccgagucaacuccacatt

SEQ ID NO: 1549 - DNA, 21 bp, Artificial Sequence
  Synthetic
  misc_feature (1)..(19): ribonucleotide unmodified or modified as described for this sequence
caaggcaaauuucucaccatt

SEQ ID NO: 1550 - DNA, 21 bp, Artificial Sequence
  Synthetic
  misc_feature (1)..(19): ribonucleotide unmodified or modified as described for this sequence
agcuguaacagucaugcgatt

SEQ ID NO: 1551 - DNA, 21 bp, Artificial Sequence
  Synthetic
  misc_feature (1)..(1): 5'-3 attached terminal deoxyabasic moiety
  misc_feature (1)..(1): 2'-deoxy-2'-Fluoro
  misc_feature (5)..(7): 2'-deoxy-2'-Fluoro
  misc_feature (9)..(10): 2'-deoxy-2'-Fluoro
  misc_feature (12)..(13): 2'-deoxy-2'-Fluoro
  misc_feature (1)..(19): ribonucleotide unmodified or modified as described for this sequence
  misc_feature (21)..(21): 3'-3 attached terminal deoxyabasic moiety
cagaccuacugccagagaatt

SEQ ID NO: 1552 - DNA, 21 bp, Artificial Sequence
  Synthetic
  misc_feature (1)..(1): 5'-3 attached terminal deoxyabasic moeity
  misc_feature (6)..(6): 2'-deoxy-2'-Fluoro
  misc_feature (8)..(8): 2'-deoxy-2'-Fluoro
  misc_feature (11)..(11): 2'-deoxy-2'-Fluoro
  misc_feature (13)..(16): 2'-deoxy-2'-Fluoro
  misc_feature (19)..(19): 2'-deoxy-2'-Fluoro
  misc_feature (1)..(19): ribonucleotide unmodified or modified as described for this sequence
  misc_feature (21)..(21): 3'-3 attached terminal deoxyabasic moeity
gaagacacaacaccucagctt

SEQ ID NO: 1553 - DNA, 21 bp, Artificial Sequence
  Synthetic
  misc_feature (1)..(1): 5'-3 attached terminal deoxyabasic moeity
  misc_feature (1)..(1): 2'-deoxy-2'-Fluoro
  misc_feature (3)..(3): 2'-deoxy-2'-Fluoro
  misc_feature (5)..(5): 2'-deoxy-2'-Fluoro
  misc_feature (10)..(14): 2'-deoxy-2'-Fluoro
  misc_feature (17)..(17): 2'-deoxy-2'-Fluoro
  misc_feature (1)..(19): ribonucleotide unmodified or modified as described for this sequence
  misc_feature (21)..(21): 3'-3 attached terminal deoxyabasic moeity
cacacaggguuccugacagtt

SEQ ID NO: 1554 - DNA, 21 bp, Artificial Sequence
  Synthetic
  misc_feature (1)..(1): 5'-3 attached terminal deoxyabasic moeity
  misc_feature (3)..(6): 2'-deoxy-2'-Fluoro
  misc_feature (9)..(10): 2'-deoxy-2'-Fluoro
  misc_feature (12)..(13): 2'-deoxy-2'-Fluoro
  misc_feature (16)..(16): 2'-deoxy-2'-Fluoro
  misc_feature (18)..(19): 2'-deoxy-2'-Fluoro
  misc_feature (1)..(19): ribonucleotide unmodified or modified as described for this sequence
  misc_feature (21)..(21): 3'-3 attached terminal deoxyabasic moeity
ggcucuagucacuggcauctt

SEQ ID NO: 1555 - DNA, 21 bp, Artificial Sequence
  Synthetic
  misc_feature (1)..(1): 2'-deoxy-2'-Fluoro
  misc_feature (1)..(1): 5'-3 attached terminal deoxyabasic moeity
  misc_feature (4)..(6): 2'-deoxy-2'-Fluoro
  misc_feature (9)..(13): 2'-deoxy-2'-Fluoro
  misc_feature (1)..(19): ribonucleotide unmodified or modified as described for this sequence
  misc_feature (21)..(21): 3'-3 attached terminal deoxyabasic moeity
uggcccagcuuuuagaaaatt

SEQ ID NO: 1556 - DNA, 21 bp, Artificial Sequence
  Synthetic
  misc_feature (1)..(1): 5'-3 attached terminal deoxyabasic moeity
  misc_feature (1)..(1): 2'-deoxy-2'-Fluoro
  misc_feature (3)..(3): 2'-deoxy-2'-Fluoro
  misc_feature (8)..(9): 2'-deoxy-2'-Fluoro
  misc_feature (12)..(14): 2'-deoxy-2'-Fluoro
  misc_feature (17)..(17): 2'-deoxy-2'-Fluoro
  misc_feature (19)..(19): 2'-deoxy-2'-Fluoro
  misc_feature (1)..(19): ribonucleotide unmodified or modified as described for this sequence
  misc_feature (21)..(21): 3'-3 attached terminal deoxyabasic moeity
uguggaguugacucggugutt

SEQ ID NO: 1557 - DNA, 21 bp, Artificial Sequence
  Synthetic
  misc_feature (1)..(1): 2'-deoxy-2'-Fluoro
  misc_feature (1)..(1): 5'-3 attached terminal deoxyabasic moeity
  misc_feature (4)..(4): 2'-deoxy-2'-Fluoro
  misc_feature (11)..(13): 2'-deoxy-2'-Fluoro
  misc_feature (15)..(18): 2'-deoxy-2'-Fluoro
  misc_feature (1)..(19): ribonucleotide unmodified or modified as described for this sequence
  misc_feature (21)..(21): 3'-3 attached terminal deoxyabasic moeity
uggugagaaauuugccuugtt

SEQ ID NO: 1558 - DNA, 21 bp, Artificial Sequence
  Synthetic
  misc_feature (1)..(1): 5'-3 attached terminal deoxyabasic moeity
  misc_feature (1)..(2): 2'-deoxy-2'-Fluoro
  misc_feature (4)..(4): 2'-deoxy-2'-Fluoro
  misc_feature (6)..(6): 2'-deoxy-2'-Fluoro
  misc_feature (9)..(10): 2'-deoxy-2'-Fluoro
  misc_feature (12)..(13): 2'-deoxy-2'-Fluoro
  misc_feature (15)..(15): 2'-deoxy-2'-Fluoro
  misc_feature (18)..(19): 2'-deoxy-2'-Fluoro
  misc_feature (1)..(19): ribonucleotide unmodified or modified as described for this sequence
  misc_feature (21)..(21): 3'-3 attached terminal deoxyabasic moeity
ucgcaugacuguuacagcutt

SEQ ID NO: 1559 - DNA, 21 bp, Artificial Sequence
  Synthetic
  misc_feature (1)..(6): 2'-deoxy-2'-Fluoro
  misc_feature (9)..(9): 2'-deoxy-2'-Fluoro
  misc_feature (12)..(12): 2'-deoxy-2'-Fluoro
  misc_feature (16)..(18): 2'-deoxy-2'-Fluoro
  misc_feature (20)..(20): Phosphorothioate 3'-Internucleotide Linkage
  misc_feature (1)..(19): ribonucleotide unmodified or modified as described for this sequence
uucucuggcaguaggucugtt

SEQ ID NO: 1560 - DNA, 21 bp, Artificial Sequence
  Synthetic
  misc_feature (2)..(3): 2'-deoxy-2'-Fluoro
  misc_feature (8)..(8): 2'-deoxy-2'-Fluoro
  misc_feature (10)..(11): 2'-deoxy-2'-Fluoro
  misc_feature (13)..(13): 2'-deoxy-2'-Fluoro
  misc_feature (15)..(19): 2'-deoxy-2'-Fluoro
  misc_feature (20)..(20): Phosphorothioate 3'-Internucleotide Linkage
  misc_feature (1)..(19): ribonucleotide unmodified or modified as described for this sequence
gcugagguguugugucuuctt

SEQ ID NO: 1561 - DNA, 21 bp, Artificial Sequence
  Synthetic
  misc_feature (1)..(2): 2'-deoxy-2'-Fluoro
  misc_feature (4)..(5): 2'-deoxy-2'-Fluoro
  misc_feature (11)..(14): 2'-deoxy-2'-Fluoro
  misc_feature (16)..(16): 2'-deoxy-2'-Fluoro
  misc_feature (18)..(18): 2'-deoxy-2'-Fluoro
  misc_feature (20)..(20): Phosphorothioate 3'-Internucleotide Linkage
  misc_feature (1)..(19): ribonucleotide unmodified or modified as described for this sequence
cugucaggaacccugugugtt

SEQ ID NO: 1562 - DNA, 21 bp, Artificial Sequence
  Synthetic
  misc_feature (3)..(3): 2'-deoxy-2'-Fluoro
  misc_feature (5)..(6): 2'-deoxy-2'-Fluoro
  misc_feature (9)..(9): 2'-deoxy-2'-Fluoro
  misc_feature (12)..(13): 2'-deoxy-2'-Fluoro
  misc_feature (18)..(19): 2'-deoxy-2'-Fluoro
  misc_feature (20)..(20): Phosphorothioate 3'-Internucleotide Linkage
  misc_feature (1)..(19): ribonucleotide unmodified or modified as described for this sequence
gaugccagugacuagagcctt

SEQ ID NO: 1563 - DNA, 21 bp, Artificial Sequence
  Synthetic
  misc_feature (1)..(6): 2'-deoxy-2'-Fluoro
  misc_feature (12)..(13): 2'-deoxy-2'-Fluoro
  misc_feature (17)..(18): 2'-deoxy-2'-Fluoro
  misc_feature (20)..(20): Phosphorothioate 3'-Internucleotide Linkage
  misc_feature (1)..(19): ribonucleotide unmodified or modified as described for this sequence
uuuucuaaaagcugggccatt

SEQ ID NO: 1564 - DNA, 21 bp, Artificial Sequence
  Synthetic
  misc_feature (2)..(2): 2'-deoxy-2'-Fluoro
  misc_feature (4)..(5): 2'-deoxy-2'-Fluoro
  misc_feature (9)..(10): 2'-deoxy-2'-Fluoro
  misc_feature (13)..(16): 2'-deoxy-2'-Fluoro
  misc_feature (18)..(18): 2'-deoxy-2'-Fluoro
  misc_feature (20)..(20): Phosphorothioate 3'-Internucleotide Linkage
  misc_feature (1)..(19): ribonucleotide unmodified or modified as described for this sequence
acaccgagucaacuccacatt

SEQ ID NO: 1565 - DNA, 21 bp, Artificial Sequence
  Synthetic
  misc_feature (1)..(1): 2'-deoxy-2'-Fluoro
  misc_feature (6)..(6): 2'-deoxy-2'-Fluoro
  misc_feature (10)..(15): 2'-deoxy-2'-Fluoro
  misc_feature (17)..(18): 2'-deoxy-2'-Fluoro
  misc_feature (20)..(20): Phosphorothioate 3'-Internucleotide Linkage
  misc_feature (1)..(19): ribonucleotide unmodified or modified as described for this sequence
caaggcaaauuucucaccatt

SEQ ID NO: 1566 - DNA, 21 bp, Artificial Sequence
  Synthetic
  misc_feature (3)..(4): 2'-deoxy-2'-Fluoro
  misc_feature (6)..(6): 2'-deoxy-2'-Fluoro
  misc_feature (9)..(9): 2'-deoxy-2'-Fluoro
  misc_feature (12)..(13): 2'-deoxy-2'-Fluoro
  misc_feature (15)..(15): 2'-deoxy-2'-Fluoro
  misc_feature (17)..(17): 2'-deoxy-2'-Fluoro
  misc_feature (20)..(20): Phosphorothioate 3'-Internucleotide Linkage
  misc_feature (1)..(19): ribonucleotide unmodified or modified as described for this sequence
agcuguaacagucaugcgatt

SEQ ID NO: 1567 - DNA, 21 bp, Artificial Sequence
  Synthetic
  misc_feature (1)..(1): 2'-deoxy-2'-Fluoro
  misc_feature (1)..(1): 5'-3 attached terminal deoxyabasic moeity
  misc_feature (2)..(2): deoxy Adenosine
  misc_feature (3)..(3): deoxy Guanosine
  misc_feature (4)..(4): deoxy Adenosine
  misc_feature (5)..(7): 2'-deoxy-2'-Fluoro
  misc_feature (8)..(8): deoxy Adenosine
  misc_feature (9)..(10): 2'-deoxy-2'-Fluoro
  misc_feature (11)..(11): deoxy Guanosine
  misc_feature (12)..(13): 2'-deoxy-2'-Fluoro
  misc_feature (14)..(14): deoxy Adenosine
  misc_feature (15)..(15): deoxy Guanosine
  misc_feature (16)..(16): deoxy Adenosine
  misc_feature (17)..(17): deoxy Guanosine
  misc_feature (18)..(19): deoxy Adenosine
  misc_feature (1)..(19): ribonucleotide unmodified or modified as described for this sequence
  misc_feature (21)..(21): 3'-3 attached terminal deoxyabasic moeity
cagaccuacugccagagaatt

SEQ ID NO: 1568 - DNA, 21 bp, Artificial Sequence
  Synthetic
  misc_feature (1)..(1): 5'-3 attached terminal deoxyabasic moeity
  misc_feature (1)..(1): deoxy Guanosine
  misc_feature (2)..(3): deoxy Adenosine
  misc_feature (4)..(4): deoxy Guanosine
  misc_feature (5)..(5): deoxy Adenosine
  misc_feature (6)..(6): 2'-deoxy-2'-Fluoro
  misc_feature (7)..(7): deoxy Adenosine
  misc_feature (8)..(8): 2'-deoxy-2'-Fluoro
  misc_feature (9)..(10): deoxy Adenosine
  misc_feature (11)..(11): 2'-deoxy-2'-Fluoro
  misc_feature (12)..(12): deoxy Adenosine
  misc_feature (13)..(16): 2'-deoxy-2'-Fluoro
  misc_feature (17)..(17): deoxy Adenosine
  misc_feature (18)..(18): deoxy Guanosine
  misc_feature (19)..(19): 2'-deoxy-2'-Fluoro
  misc_feature (1)..(19): ribonucleotide unmodified or modified as described for this sequence
  misc_feature (21)..(21): 3'-3 attached terminal deoxyabasic moeity
gaagacacaacaccucagctt

SEQ ID NO: 1569 - DNA, 21 bp, Artificial Sequence
  Synthetic
  misc_feature (1)..(1): 2'-deoxy-2'-Fluoro
  misc_feature (1)..(1): 5'-3 attached terminal deoxyabasic moeity
  misc_feature (2)..(2): deoxy Adenosine
  misc_feature (3)..(3): 2'-deoxy-2'-Fluoro
  misc_feature (4)..(4): deoxy Adenosine
  misc_feature (5)..(5): 2'-deoxy-2'-Fluoro
  misc_feature (6)..(6): deoxy Adenosine
  misc_feature (7)..(9): deoxy Guanosine
  misc_feature (10)..(14): 2'-deoxy-2'-Fluoro
  misc_feature (15)..(15): deoxy Guanosine
  misc_feature (16)..(16): deoxy Adenosine
  misc_feature (17)..(17): 2'-deoxy-2'-Fluoro
  misc_feature (18)..(18): deoxy Adenosine
  misc_feature (19)..(19): deoxy Guanosine
  misc_feature (1)..(19): ribonucleotide unmodified or modified as described for this sequence
  misc_feature (21)..(21): 3'-3 attached terminal deoxyabasic moeity
cacacaggguuccugacagtt

SEQ ID NO: 1570 - DNA, 21 bp, Artificial Sequence
  Synthetic
  misc_feature (1)..(1): 5'-3 attached terminal deoxyabasic moeity
  misc_feature (1)..(2): deoxy Guanosine
  misc_feature (3)..(6): 2'-deoxy-2'-Fluoro
  misc_feature (7)..(7): deoxy Adenosine
  misc_feature (8)..(8): deoxy Guanosine
  misc_feature (9)..(10): 2'-deoxy-2'-Fluoro
  misc_feature (11)..(11): deoxy Adenosine
  misc_feature (12)..(13): 2'-deoxy-2'-Fluoro
  misc_feature (14)..(15): deoxy Guanosine
  misc_feature (16)..(16): 2'-deoxy-2'-Fluoro
  misc_feature (17)..(17): deoxy Adenosine
  misc_feature (18)..(19): 2'-deoxy-2'-Fluoro
  misc_feature (1)..(19): ribonucleotide unmodified or modified as described for this sequence
  misc_feature (21)..(21): 3'-3 attached terminal deoxyabasic moeity
ggcucuagucacuggcauctt

SEQ ID NO: 1571 - DNA, 21 bp, Artificial Sequence
  Synthetic
  misc_feature (1)..(1): 2'-deoxy-2'-Fluoro
  misc_feature (1)..(1): 5'-3 attached terminal deoxyabasic moeity
  misc_feature (2)..(3): deoxy Guanosine
  misc_feature (4)..(6): 2'-deoxy-2'-Fluoro
  misc_feature (7)..(7): deoxy Adenosine
  misc_feature (8)..(8): deoxy Guanosine
  misc_feature (9)..(13): 2'-deoxy-2'-Fluoro
  misc_feature (14)..(14): deoxy Adenosine
  misc_feature (15)..(15): deoxy Guanosine
  misc_feature (16)..(19): deoxy Adenosine
  misc_feature (1)..(19): ribonucleotide unmodified or modified as described for this sequence
  misc_feature (21)..(21): 3'-3 attached terminal deoxyabasic moeity
uggcccagcuuuuagaaaatt

SEQ ID NO: 1572 - DNA, 21 bp, Artificial Sequence
  Synthetic
  misc_feature (1)..(1): 5'-3 attached terminal deoxyabasic moeity
  misc_feature (1)..(1): 2'-deoxy-2'-Fluoro
  misc_feature (2)..(2): deoxy Guanosine
  misc_feature (3)..(3): 2'-deoxy-2'-Fluoro
  misc_feature (4)..(5): deoxy Guanosine
  misc_feature (6)..(6): deoxy Adenosine
  misc_feature (7)..(7): deoxy Guanosine
  misc_feature (8)..(9): 2'-deoxy-2'-Fluoro
  misc_feature (10)..(10): deoxy Guanosine
  misc_feature (11)..(11): deoxy Adenosine
  misc_feature (12)..(14): 2'-deoxy-2'-Fluoro
  misc_feature (15)..(16): deoxy Guanosine
  misc_feature (17)..(17): 2'-deoxy-2'-Fluoro
  misc_feature (18)..(18): deoxy Guanosine
  misc_feature (19)..(19): 2'-deoxy-2'-Fluoro
  misc_feature (1)..(19): ribonucleotide unmodified or modified as described for this sequence
  misc_feature (21)..(21): 3'-3 attached terminal deoxyabasic moeity
uguggaguugacucggugutt

SEQ ID NO: 1573 - DNA, 21 bp, Artificial Sequence
  Synthetic
  misc_feature (1)..(1): 2'-deoxy-2'-Fluoro
  misc_feature (1)..(1): 5'-3 attached terminal deoxyabasic moeity
  misc_feature (2)..(3): deoxy Guanosine
  misc_feature (4)..(4): 2'-deoxy-2'-Fluoro
  misc_feature (5)..(5): deoxy Guanosine
  misc_feature (6)..(6): deoxy Adenosine
  misc_feature (7)..(7): deoxy Guanosine
  misc_feature (8)..(10): deoxy Adenosine
  misc_feature (11)..(13): 2'-deoxy-2'-Fluoro
  misc_feature (14)..(14): deoxy Guanosine
  misc_feature (15)..(18): 2'-deoxy-2'-Fluoro
  misc_feature (19)..(19): deoxy Guanosine
  misc_feature (1)..(19): ribonucleotide unmodified or modified as described for this sequence
  misc_feature (21)..(21): 3'-3 attached terminal deoxyabasic moeity
uggugagaaauuugccuugtt

SEQ ID NO: 1574 - DNA, 21 bp, Artificial Sequence
  Synthetic
  misc_feature (1)..(1): 5'-3 attached terminal deoxyabasic moeity
  misc_feature (1)..(2): 2'-deoxy-2'-Fluoro
  misc_feature (3)..(3): deoxy Guanosine
  misc_feature (4)..(4): 2'-deoxy-2'-Fluoro
  misc_feature (5)..(5): deoxy Adenosine
  misc_feature (6)..(6): 2'-deoxy-2'-Fluoro
  misc_feature (7)..(7): deoxy Guanosine
  misc_feature (8)..(8): deoxy Adenosine
  misc_feature (9)..(10): 2'-deoxy-2'-Fluoro
  misc_feature (11)..(11): deoxy Guanosine
  misc_feature (12)..(13): 2'-deoxy-2'-Fluoro
  misc_feature (14)..(14): deoxy Adenosine
  misc_feature (15)..(15): 2'-deoxy-2'-Fluoro
  misc_feature (16)..(16): deoxy Adenosine
  misc_feature (17)..(17): deoxy Guanosine
  misc_feature (18)..(19): 2'-deoxy-2'-Fluoro
  misc_feature (1)..(19): ribonucleotide unmodified or modified as described for this sequence
  misc_feature (21)..(21): 3'-3 attached terminal deoxyabasic moeity
ucgcaugacuguuacagcutt

SEQ ID NO: 1575 - DNA, 21 bp, Artificial Sequence
  Synthetic
  misc_feature (1)..(6): 2'-deoxy-2'-Fluoro
  misc_feature (7)..(8): deoxy Guanosine
  misc_feature (9)..(9): 2'-deoxy-2'-Fluoro
  misc_feature (10)..(10): deoxy Adenosine
  misc_feature (11)..(11): deoxy Guanosine
  misc_feature (12)..(12): 2'-deoxy-2'-Fluoro
  misc_feature (13)..(13): deoxy Adenosine
  misc_feature (14)..(15): deoxy Guanosine
  misc_feature (16)..(18): 2'-deoxy-2'-Fluoro
  misc_feature (19)..(19): deoxy Guanosine
  misc_feature (20)..(20): Phosphorothioate 3'-Internucleotide Linkage
  misc_feature (1)..(19): ribonucleotide unmodified or modified as described for this sequence
uucucuggcaguaggucugtt

SEQ ID NO: 1576 - DNA, 21 bp, Artificial Sequence
  Synthetic
  misc_feature (1)..(1): deoxy Guanosine
  misc_feature (2)..(3): 2'-deoxy-2'-Fluoro
  misc_feature (4)..(4): deoxy Guanosine
  misc_feature (5)..(5): deoxy Adenosine
  misc_feature (6)..(7): deoxy Guanosine
  misc_feature (8)..(8): 2'-deoxy-2'-Fluoro
  misc_feature (9)..(9): deoxy Guanosine
  misc_feature (10)..(11): 2'-deoxy-2'-Fluoro
  misc_feature (12)..(12): deoxy Guanosine
  misc_feature (13)..(13): 2'-deoxy-2'-Fluoro
  misc_feature (14)..(14): deoxy Guanosine
  misc_feature (15)..(19): 2'-deoxy-2'-Fluoro
  misc_feature (20)..(20): Phosphorothioate 3'-Internucleotide Linkage
  misc_feature (1)..(19): ribonucleotide unmodified or modified as described for this sequence
gcugagguguugugucuuctt

SEQ ID NO: 1577 - DNA, 21 bp, Artificial Sequence
  Synthetic
  misc_feature (1)..(2): 2'-deoxy-2'-Fluoro
  misc_feature (3)..(3): deoxy Guanosine
  misc_feature (4)..(5): 2'-deoxy-2'-Fluoro
  misc_feature (6)..(6): deoxy Adenosine
  misc_feature (7)..(8): deoxy Guanosine
  misc_feature (9)..(10): deoxy Adenosine
  misc_feature (11)..(14): 2'-deoxy-2'-Fluoro
  misc_feature (15)..(15): deoxy Guanosine
  misc_feature (16)..(16): 2'-deoxy-2'-Fluoro
  misc_feature (17)..(17): deoxy Guanosine
  misc_feature (18)..(18): 2'-deoxy-2'-Fluoro
  misc_feature (19)..(19): deoxy Guanosine
  misc_feature (20)..(20): Phosphorothioate 3'-Internucleotide Linkage
  misc_feature (1)..(19): ribonucleotide unmodified or modified as described for this sequence
cugucaggaacccugugugtt

SEQ ID NO: 1578 - DNA, 21 bp, Artificial Sequence
  Synthetic
  misc_feature (1)..(1): deoxy Guanosine
  misc_feature (2)..(2): deoxy Adenosine
  misc_feature (3)..(3): 2'-deoxy-2'-Fluoro
  misc_feature (4)..(4): deoxy Guanosine
  misc_feature (5)..(6): 2'-deoxy-2'-Fluoro
  misc_feature (7)..(7): deoxy Adenosine
  misc_feature (8)..(8): deoxy Guanosine
  misc_feature (9)..(9): 2'-deoxy-2'-Fluoro
  misc_feature (10)..(10): deoxy Guanosine
  misc_feature (11)..(11): deoxy Adenosine
  misc_feature (12)..(13): 2'-deoxy-2'-Fluoro
  misc_feature (14)..(14): deoxy Adenosine
  misc_feature (15)..(15): deoxy Guanosine
  misc_feature (16)..(16): deoxy Adenosine
  misc_feature (17)..(17): deoxy Guanosine
  misc_feature (18)..(19): 2'-deoxy-2'-Fluoro
  misc_feature (20)..(20): Phosphorothioate 3'-Internucleotide Linkage
  misc_feature (1)..(19): ribonucleotide unmodified or modified as described for this sequence
gaugccagugacuagagcctt

SEQ ID NO: 1579 - DNA, 21 bp, Artificial Sequence
  Synthetic
  misc_feature (1)..(6): 2'-deoxy-2'-Fluoro
  misc_feature (7)..(10): deoxy Adenosine
  misc_feature (11)..(11): deoxy Guanosine
  misc_feature (12)..(13): 2'-deoxy-2'-Fluoro
  misc_feature (14)..(16): deoxy Guanosine
  misc_feature (17)..(18): 2'-deoxy-2'-Fluoro
  misc_feature (19)..(19): deoxy Adenosine
  misc_feature (20)..(20): Phosphorothioate 3'-Internucleotide Linkage
  misc_feature (1)..(19): ribonucleotide unmodified or modified as described for this sequence
uuuucuaaaagcugggccatt

SEQ ID NO: 1580 - DNA, 21 bp, Artificial Sequence
  Synthetic
  misc_feature (1)..(1): deoxy Adenosine
  misc_feature (2)..(2): 2'-deoxy-2'-Fluoro
  misc_feature (3)..(3): deoxy Adenosine
  misc_feature (4)..(5): 2'-deoxy-2'-Fluoro
  misc_feature (6)..(6): deoxy Guanosine
  misc_feature (7)..(7): deoxy Adenosine
  misc_feature (8)..(8): deoxy Guanosine
  misc_feature (9)..(10): 2'-deoxy-2'-Fluoro
  misc_feature (11)..(12): deoxy Adenosine
  misc_feature (13)..(16): 2'-deoxy-2'-Fluoro
  misc_feature (17)..(17): deoxy Adenosine
  misc_feature (18)..(18): 2'-deoxy-2'-Fluoro
  misc_feature (19)..(19): deoxy Adenosine
  misc_feature (20)..(20): Phosphorothioate 3'-Internucleotide Linkage
  misc_feature (1)..(19): ribonucleotide unmodified or modified as described for this sequence
acaccgagucaacuccacatt

SEQ ID NO: 1581 - DNA, 21 bp, Artificial Sequence
  Synthetic
  misc_feature (1)..(1): 2'-deoxy-2'-Fluoro
  misc_feature (2)..(3): deoxy Adenosine
  misc_feature (4)..(5): deoxy Guanosine
  misc_feature (6)..(6): 2'-deoxy-2'-Fluoro
  misc_feature (7)..(9): deoxy Adenosine
  misc_feature (10)..(15): 2'-deoxy-2'-Fluoro
  misc_feature (16)..(16): deoxy Adenosine
  misc_feature (17)..(18): 2'-deoxy-2'-Fluoro
  misc_feature (19)..(19): deoxy Adenosine
  misc_feature (20)..(20): Phosphorothioate 3'-Internucleotide Linkage
  misc_feature (1)..(19): ribonucleotide unmodified or modified as described for this sequence
caaggcaaauuucucaccatt

SEQ ID NO: 1582 - DNA, 21 bp, Artificial Sequence
  Synthetic
  misc_feature (1)..(1): deoxy Adenosine
  misc_feature (2)..(2): deoxy Guanosine
  misc_feature (3)..(4): 2'-deoxy-2'-Fluoro
  misc_feature (5)..(5): deoxy Guanosine
  misc_feature (6)..(6): 2'-deoxy-2'-Fluoro
  misc_feature (7)..(8): deoxy Adenosine
  misc_feature (9)..(9): 2'-deoxy-2'-Fluoro
  misc_feature (10)..(10): deoxy Adenosine
  misc_feature (11)..(11): deoxy Guanosine
  misc_feature (12)..(13): 2'-deoxy-2'-Fluoro
  misc_feature (14)..(14): deoxy Adenosine
  misc_feature (15)..(15): 2'-deoxy-2'-Fluoro
  misc_feature (16)..(16): deoxy Guanosine
  misc_feature (17)..(17): 2'-deoxy-2'-Fluoro
  misc_feature (18)..(18): deoxy Guanosine
  misc_feature (19)..(19): deoxy Adenosine
  misc_feature (20)..(20): Phosphorothioate 3'-Internucleotide Linkage
  misc_feature (1)..(19): ribonucleotide unmodified or modified as described for this sequence
agcuguaacagucaugcgatt

SEQ ID NO: 1583 - DNA, 21 bp, Artificial Sequence
  Synthetic
  misc_feature (1)..(1): 2'-deoxy-2'-Fluoro
  misc_feature (1)..(1): 5'-3 attached terminal deoxyabasic moeity
  misc_feature (2)..(4): 2'-O-methyl
  misc_feature (5)..(7): 2'-deoxy-2'-Fluoro
  misc_feature (8)..(8): 2'-O-methyl
  misc_feature (9)..(10): 2'-deoxy-2'-Fluoro
  misc_feature (11)..(11): 2'-O-methyl
  misc_feature (12)..(13): 2'-deoxy-2'-Fluoro
  misc_feature (14)..(19): 2'-O-methyl
  misc_feature (1)..(19): ribonucleotide unmodified or modified as described for this sequence
  misc_feature (21)..(21): 3'-3 attached terminal deoxyabasic moeity
cagaccuacugccagagaatt

SEQ ID NO: 1584 - DNA, 21 bp, Artificial Sequence
  Synthetic
  misc_feature (1)..(1): 5'-3 attached terminal deoxyabasic moeity
  misc_feature (1)..(5): 2'-O-methyl
  misc_feature (6)..(6): 2'-deoxy-2'-Fluoro
  misc_feature (7)..(7): 2'-O-methyl
  misc_feature (8)..(8): 2'-deoxy-2'-Fluoro
  misc_feature (9)..(10): 2'-O-methyl
  misc_feature (11)..(11): 2'-deoxy-2'-Fluoro
  misc_feature (12)..(12): 2'-O-methyl
  misc_feature (13)..(16): 2'-deoxy-2'-Fluoro
  misc_feature (17)..(18): 2'-O-methyl
  misc_feature (19)..(19): 2'-deoxy-2'-Fluoro
  misc_feature (1)..(19): ribonucleotide unmodified or modified as described for this sequence
  misc_feature (21)..(21): 3'-3 attached terminal deoxyabasic moeity
gaagacacaacaccucagctt

SEQ ID NO: 1585 - DNA, 21 bp, Artificial Sequence
  Synthetic
  misc_feature (1)..(1): 2'-deoxy-2'-Fluoro
  misc_feature (1)..(1): 5'-3 attached terminal deoxyabasic moeity
  misc_feature (2)..(2): 2'-O-methyl
  misc_feature (3)..(3): 2'-deoxy-2'-Fluoro
  misc_feature (4)..(4): 2'-O-methyl
  misc_feature (5)..(5): 2'-deoxy-2'-Fluoro
  misc_feature (6)..(9): 2'-O-methyl
  misc_feature (10)..(14): 2'-deoxy-2'-Fluoro
  misc_feature (15)..(16): 2'-O-methyl
  misc_feature (17)..(17): 2'-deoxy-2'-Fluoro
  misc_feature (18)..(19): 2'-O-methyl
  misc_feature (1)..(19): ribonucleotide unmodified or modified as described for this sequence
  misc_feature (21)..(21): 3'-3 attached terminal deoxyabasic moeity
cacacaggguuccugacagtt

SEQ ID NO: 1586 - DNA, 21 bp, Artificial Sequence
  Synthetic
  misc_feature (1)..(1): 5'-3 attached terminal deoxyabasic moeity
  misc_feature (1)..(2): 2'-O-methyl
  misc_feature (3)..(6): 2'-deoxy-2'-Fluoro
  misc_feature (7)..(8): 2'-O-methyl
  misc_feature (9)..(10): 2'-deoxy-2'-Fluoro
  misc_feature (11)..(11): 2'-O-methyl
  misc_feature (12)..(13): 2'-deoxy-2'-Fluoro
  misc_feature (14)..(15): 2'-O-methyl
  misc_feature (16)..(16): 2'-deoxy-2'-Fluoro
  misc_feature (17)..(17): 2'-O-methyl
  misc_feature (18)..(19): 2'-deoxy-2'-Fluoro
  misc_feature (1)..(19): ribonucleotide unmodified or modified as described for this sequence
  misc_feature (21)..(21): 3'-3 attached terminal deoxyabasic moeity
ggcucuagucacuggcauctt

SEQ ID NO: 1587 - DNA, 21 bp, Artificial Sequence
  Synthetic
  misc_feature (1)..(1): 2'-deoxy-2'-Fluoro
  misc_feature (1)..(1): 5'-3 attached terminal deoxyabasic moeity
  misc_feature (2)..(3): 2'-O-methyl
  misc_feature (4)..(6): 2'-deoxy-2'-Fluoro
  misc_feature (7)..(8): 2'-O-methyl
  misc_feature (9)..(13): 2'-deoxy-2'-Fluoro
  misc_feature (14)..(19): 2'-O-methyl
  misc_feature (1)..(19): ribonucleotide unmodified or modified as described for this sequence
  misc_feature (21)..(21): 3'-3 attached terminal deoxyabasic moeity
uggcccagcuuuuagaaaatt

SEQ ID NO: 1588 - DNA, 21 bp, Artificial Sequence
  Synthetic
  misc_feature (1)..(1): 5'-3 attached terminal deoxyabasic moeity
  misc_feature (1)..(1): 2'-deoxy-2'-Fluoro
  misc_feature (2)..(2): 2'-O-methyl
  misc_feature (3)..(3): 2'-deoxy-2'-Fluoro
  misc_feature (4)..(7): 2'-O-methyl
  misc_feature (8)..(9): 2'-deoxy-2'-Fluoro
  misc_feature (10)..(11): 2'-O-methyl
  misc_feature (12)..(14): 2'-deoxy-2'-Fluoro
  misc_feature (15)..(16): 2'-O-methyl
  misc_feature (17)..(17): 2'-deoxy-2'-Fluoro
  misc_feature (18)..(18): 2'-O-methyl
  misc_feature (19)..(19): 2'-deoxy-2'-Fluoro
  misc_feature (1)..(19): ribonucleotide unmodified or modified as described for this sequence
  misc_feature (21)..(21): 3'-3 attached terminal deoxyabasic moeity
uguggaguugacucggugutt

SEQ ID NO: 1589 - DNA, 21 bp, Artificial Sequence
  Synthetic
  misc_feature (1)..(1): 2'-deoxy-2'-Fluoro
  misc_feature (1)..(1): 5'-3 attached terminal deoxyabasic moeity
  misc_feature (2)..(3): 2'-O-methyl
  misc_feature (4)..(4): 2'-deoxy-2'-Fluoro
  misc_feature (5)..(10): 2'-O-methyl
  misc_feature (11)..(13): 2'-deoxy-2'-Fluoro
  misc_feature (14)..(14): 2'-O-methyl
  misc_feature (15)..(18): 2'-deoxy-2'-Fluoro
  misc_feature (19)..(19): 2'-O-methyl
  misc_feature (1)..(19): ribonucleotide unmodified or modified as described for this sequence
  misc_feature (21)..(21): 3'-3 attached terminal deoxyabasic moeity
uggugagaaauuugccuugtt

SEQ ID NO: 1590 - DNA, 21 bp, Artificial Sequence
  Synthetic
  misc_feature (1)..(1): 5'-3 attached terminal deoxyabasic moeity
  misc_feature (1)..(2): 2'-deoxy-2'-Fluoro
  misc_feature (3)..(3): 2'-O-methyl
  misc_feature (4)..(4): 2'-deoxy-2'-Fluoro
  misc_feature (5)..(5): 2'-O-methyl
  misc_feature (6)..(6): 2'-deoxy-2'-Fluoro
  misc_feature (7)..(8): 2'-O-methyl
  misc_feature (9)..(10): 2'-deoxy-2'-Fluoro
  misc_feature (11)..(11): 2'-O-methyl
  misc_feature (12)..(13): 2'-deoxy-2'-Fluoro
  misc_feature (14)..(14): 2'-O-methyl
  misc_feature (15)..(15): 2'-deoxy-2'-Fluoro
  misc_feature (16)..(17): 2'-O-methyl
  misc_feature (18)..(19): 2'-deoxy-2'-Fluoro
  misc_feature (1)..(19): ribonucleotide unmodified or modified as described for this sequence
  misc_feature (21)..(21): 3'-3 attached terminal deoxyabasic moeity
ucgcaugacuguuacagcutt

SEQ ID NO: 1591 - DNA, 21 bp, Artificial Sequence
  Synthetic
  misc_feature (1)..(6): 2'-deoxy-2'-Fluoro
  misc_feature (7)..(8): 2'-O-methyl
  misc_feature (9)..(9): 2'-deoxy-2'-Fluoro
  misc_feature (10)..(11): 2'-O-methyl
  misc_feature (12)..(12): 2'-deoxy-2'-Fluoro
  misc_feature (13)..(15): 2'-O-methyl
  misc_feature (16)..(18): 2'-deoxy-2'-Fluoro
  misc_feature (19)..(19): 2'-O-methyl
  misc_feature (20)..(20): Phosphorothioate 3'-Internucleotide Linkage
  misc_feature (1)..(19): ribonucleotide unmodified or modified as described for this sequence
uucucuggcaguaggucugtt

SEQ ID NO: 1592 - DNA, 21 bp, Artificial Sequence
  Synthetic
  misc_feature (1)..(1): 2'-O-methyl
  misc_feature (2)..(3): 2'-deoxy-2'-Fluoro
  misc_feature (4)..(7): 2'-O-methyl
  misc_feature (8)..(8): 2'-deoxy-2'-Fluoro
  misc_feature (9)..(9): 2'-O-methyl
  misc_feature (10)..(11): 2'-deoxy-2'-Fluoro
  misc_feature (12)..(12): 2'-O-methyl
  misc_feature (13)..(13): 2'-deoxy-2'-Fluoro
  misc_feature (14)..(14): 2'-O-methyl
  misc_feature (15)..(19): 2'-deoxy-2'-Fluoro
  misc_feature (20)..(20): Phosphorothioate 3'-Internucleotide Linkage
  misc_feature (1)..(19): ribonucleotide unmodified or modified as described for this sequence
gcugagguguugugucuuctt

SEQ ID NO: 1593 - DNA, 21 bp, Artificial Sequence
  Synthetic
  misc_feature (1)..(2): 2'-deoxy-2'-Fluoro
  misc_feature (3)..(3): 2'-O-methyl
  misc_feature (4)..(5): 2'-deoxy-2'-Fluoro
  misc_feature (6)..(10): 2'-O-methyl
  misc_feature (11)..(14): 2'-deoxy-2'-Fluoro
  misc_feature (15)..(15): 2'-O-methyl
  misc_feature (16)..(16): 2'-deoxy-2'-Fluoro
  misc_feature (17)..(17): 2'-O-methyl
  misc_feature (18)..(18): 2'-deoxy-2'-Fluoro
  misc_feature (19)..(19): 2'-O-methyl
  misc_feature (20)..(20): Phosphorothioate 3'-Internucleotide Linkage
  misc_feature (1)..(19): ribonucleotide unmodified or modified as described for this sequence
cugucaggaacccugugugtt

SEQ ID NO: 1594 - DNA, 21 bp, Artificial Sequence
  Synthetic
  misc_feature (1)..(2): 2'-O-methyl
  misc_feature (3)..(3): 2'-deoxy-2'-Fluoro
  misc_feature (4)..(4): 2'-O-methyl
  misc_feature (5)..(6): 2'-deoxy-2'-Fluoro
  misc_feature (7)..(8): 2'-O-methyl
  misc_feature (9)..(9): 2'-deoxy-2'-Fluoro
  misc_feature (10)..(11): 2'-O-methyl
  misc_feature (12)..(13): 2'-deoxy-2'-Fluoro
  misc_feature (14)..(17): 2'-O-methyl
  misc_feature (18)..(19): 2'-deoxy-2'-Fluoro
  misc_feature (19)..(19): 2'-O-methyl
  misc_feature (20)..(20): Phosphorothioate 3'-Internucleotide Linkage
  misc_feature (1)..(19): ribonucleotide unmodified or modified as described for this sequence
gaugccagugacuagagcctt

SEQ ID NO: 1595 - DNA, 21 bp, Artificial Sequence
  Synthetic
  misc_feature (1)..(6): 2'-deoxy-2'-Fluoro
  misc_feature (7)..(11): 2'-O-methyl
  misc_feature (12)..(13): 2'-deoxy-2'-Fluoro
  misc_feature (14)..(16): 2'-O-methyl
  misc_feature (17)..(18): 2'-deoxy-2'-Fluoro
  misc_feature (19)..(19): 2'-O-methyl
  misc_feature (20)..(20): Phosphorothioate 3'-Internucleotide Linkage
  misc_feature (1)..(19): ribonucleotide unmodified or modified as described for this sequence
uuuucuaaaagcugggccatt

SEQ ID NO: 1596 - DNA, 21 bp, Artificial Sequence
  Synthetic
  misc_feature (1)..(1): 2'-O-methyl
  misc_feature (2)..(2): 2'-deoxy-2'-Fluoro
  misc_feature (3)..(3): 2'-O-methyl
  misc_feature (4)..(5): 2'-deoxy-2'-Fluoro
  misc_feature (6)..(8): 2'-O-methyl
  misc_feature (9)..(10): 2'-deoxy-2'-Fluoro
  misc_feature (11)..(12): 2'-O-methyl
  misc_feature (13)..(16): 2'-deoxy-2'-Fluoro
  misc_feature (17)..(17): 2'-O-methyl
  misc_feature (18)..(18): 2'-deoxy-2'-Fluoro
  misc_feature (19)..(19): 2'-O-methyl
  misc_feature (20)..(20): Phosphorothioate 3'-Internucleotide Linkage
  misc_feature (1)..(19): ribonucleotide unmodified or modified as described for this sequence
acaccgagucaacuccacatt

SEQ ID NO: 1597 - DNA, 21 bp, Artificial Sequence
  Synthetic
  misc_feature (1)..(1): 2'-deoxy-2'-Fluoro
  misc_feature (2)..(5): 2'-O-methyl
  misc_feature (6)..(6): 2'-deoxy-2'-Fluoro
  misc_feature (7)..(9): 2'-O-methyl
  misc_feature (10)..(15): 2'-deoxy-2'-Fluoro
  misc_feature (16)..(16): 2'-O-methyl
  misc_feature (17)..(18): 2'-deoxy-2'-Fluoro
  misc_feature (19)..(19): 2'-O-methyl
  misc_feature (20)..(20): Phosphorothioate 3'-Internucleotide Linkage
  misc_feature (1)..(19): ribonucleotide unmodified or modified as described for this sequence
caaggcaaauuucucaccatt

SEQ ID NO: 1598 - DNA, 21 bp, Artificial Sequence
  Synthetic
  misc_feature (1)..(2): 2'-O-methyl
  misc_feature (3)..(4): 2'-deoxy-2'-Fluoro
  misc_feature (5)..(5): 2'-O-methyl
  misc_feature (6)..(6): 2'-deoxy-2'-Fluoro
  misc_feature (7)..(8): 2'-O-methyl
  misc_feature (9)..(9): 2'-deoxy-2'-Fluoro
  misc_feature (10)..(11): 2'-O-methyl
  misc_feature (12)..(13): 2'-deoxy-2'-Fluoro
  misc_feature (14)..(14): 2'-O-methyl
  misc_feature (15)..(15): 2'-deoxy-2'-Fluoro
  misc_feature (16)..(16): 2'-O-methyl
  misc_feature (17)..(17): 2'-deoxy-2'-Fluoro
  misc_feature (18)..(19): 2'-O-methyl
  misc_feature (20)..(20): Phosphorothioate 3'-Internucleotide Linkage
  misc_feature (1)..(19): ribonucleotide unmodified or modified as described for this sequence
agcuguaacagucaugcgatt

SEQ ID NO: 1599 - DNA, 21 bp, Artificial Sequence
  Synthetic
  misc_feature (1)..(1): 5'-3 attached terminal deoxyabasic moeity
  misc_feature (1)..(19): ribonucleotide unmodified or modified as described for this sequence
  misc_feature (21)..(21): 3'-3 attached terminal deoxyabasic moeity
cagaccuacugccagagaatt

SEQ ID NO: 1600 - DNA, 21 bp, Artificial Sequence
  Synthetic
  misc_feature (1)..(1): 5'-3 attached terminal deoxyabasic moeity
  misc_feature (1)..(19): ribonucleotide unmodified or modified as described for this sequence
  misc_feature (21)..(21): 3'-3 attached terminal deoxyabasic moeity
gaagacacaacaccucagctt

SEQ ID NO: 1601 - DNA, 21 bp, Artificial Sequence
  Synthetic
  misc_feature (1)..(1): 5'-3 attached terminal deoxyabasic moeity
  misc_feature (1)..(19): ribonucleotide unmodified or modified as described for this sequence
  misc_feature (21)..(21): 3'-3 attached terminal deoxyabasic moeity
cacacaggguuccugacagtt

SEQ ID NO: 1602 - DNA, 21 bp, Artificial Sequence
  Synthetic
  misc_feature (1)..(1): 5'-3 attached terminal deoxyabasic moeity
  misc_feature (1)..(19): ribonucleotide unmodified or modified as described for this sequence
  misc_feature (21)..(21): 3'-3 attached terminal deoxyabasic moeity
ggcucuagucacuggcauctt

SEQ ID NO: 1603 - DNA, 21 bp, Artificial Sequence
  Synthetic
  misc_feature (1)..(1): 5'-3 attached terminal deoxyabasic moeity
  misc_feature (1)..(19): ribonucleotide unmodified or modified as described for this sequence
  misc_feature (21)..(21): 3'-3 attached terminal deoxyabasic moeity
uggcccagcuuuuagaaaatt

SEQ ID NO: 1604 - DNA, 21 bp, Artificial Sequence
  Synthetic
  misc_feature (1)..(1): 5'-3 attached terminal deoxyabasic moeity
  misc_feature (1)..(19): ribonucleotide unmodified or modified as described for this sequence
  misc_feature (21)..(21): 3'-3 attached terminal deoxyabasic moeity
uguggaguugacucggugutt

SEQ ID NO: 1605 - DNA, 21 bp, Artificial Sequence
  Synthetic
  misc_feature (1)..(1): 5'-3 attached terminal deoxyabasic moeity
  misc_feature (1)..(19): ribonucleotide unmodified or modified as described for this sequence
  misc_feature (21)..(21): 3'-3 attached terminal deoxyabasic moeity
uggugagaaauuugccuugtt

SEQ ID NO: 1606 - DNA, 21 bp, Artificial Sequence
  Synthetic
  misc_feature (1)..(1): 5'-3 attached terminal deoxyabasic moeity
  misc_feature (1)..(19): ribonucleotide unmodified or modified as described for this sequence
  misc_feature (21)..(21): 3'-3 attached terminal deoxyabasic moeity
ucgcaugacuguuacagcutt

SEQ ID NO: 1607 - DNA, 21 bp, Artificial Sequence
  Synthetic
  misc_feature (20)..(20): Phosphorothioate 3'-Internucleotide Linkage
  misc_feature (1)..(19): ribonucleotide unmodified or modified as described for this sequence
uucucuggcaguaggucugtt

SEQ ID NO: 1608 - DNA, 21 bp, Artificial Sequence
  Synthetic
  misc_feature (20)..(20): Phosphorothioate 3'-Internucleotide Linkage
  misc_feature (1)..(19): ribonucleotide unmodified or modified as described for this sequence
gcugagguguugugucuuctt

SEQ ID NO: 1609 - DNA, 21 bp, Artificial Sequence
  Synthetic
  misc_feature (20)..(20): Phosphorothioate 3'-Internucleotide Linkage
  misc_feature (1)..(19): ribonucleotide unmodified or modified as described for this sequence
cugucaggaacccugugugtt

SEQ ID NO: 1610 - DNA, 21 bp, Artificial Sequence
  Synthetic
  misc_feature (20)..(20): Phosphorothioate 3'-Internucleotide Linkage
  misc_feature (1)..(19): ribonucleotide unmodified or modified as described for this sequence
gaugccagugacuagagcctt

SEQ ID NO: 1611 - DNA, 21 bp, Artificial Sequence
  Synthetic
  misc_feature (20)..(20): Phosphorothioate 3'-Internucleotide Linkage
  misc_feature (1)..(19): ribonucleotide unmodified or modified as described for this sequence
uuuucuaaaagcugggccatt

SEQ ID NO: 1612 - DNA, 21 bp, Artificial Sequence
  Synthetic
  misc_feature (20)..(20): Phosphorothioate 3'-Internucleotide Linkage
  misc_feature (20)..(20)
  misc_feature (1)..(19): ribonucleotide unmodified or modified as described for this sequence
acaccgagucaacuccacatt

SEQ ID NO: 1613 - DNA, 21 bp, Artificial Sequence
  Synthetic
  misc_feature (20)..(20): Phosphorothioate 3'-Internucleotide Linkage
  misc_feature (1)..(19): ribonucleotide unmodified or modified as described for this sequence
caaggcaaauuucucaccatt

SEQ ID NO: 1614 - DNA, 21 bp, Artificial Sequence
  Synthetic
  misc_feature (20)..(20): Phosphorothioate 3'-Internucleotide Linkage
  misc_feature (1)..(19): ribonucleotide unmodified or modified as described for this sequence
agcuguaacagucaugcgatt

SEQ ID NO: 1615 - DNA, 21 bp, Artificial Sequence
  Synthetic
  misc_feature (1)..(6): 2'-deoxy-2'-Fluoro
  misc_feature (7)..(8): 2'-O-methyl
  misc_feature (9)..(9): 2'-deoxy-2'-Fluoro
  misc_feature (10)..(11): 2'-O-methyl
  misc_feature (12)..(12): 2'-deoxy-2'-Fluoro
  misc_feature (13)..(15): 2'-O-methyl
  misc_feature (16)..(18): 2'-deoxy-2'-Fluoro
  misc_feature (19)..(19): 2'-O-methyl
  misc_feature (1)..(19): ribonucleotide unmodified or modified as described for this sequence
  misc_feature (21)..(21): 3'-3 attached terminal deoxyabasic moeity
uucucuggcaguaggucugtt

SEQ ID NO: 1616 - DNA, 21 bp, Artificial Sequence
  Synthetic
  misc_feature (1)..(1): 2'-O-methyl
  misc_feature (2)..(3): 2'-deoxy-2'-Fluoro
  misc_feature (4)..(7): 2'-O-methyl
  misc_feature (8)..(8): 2'-deoxy-2'-Fluoro
  misc_feature (9)..(9): 2'-O-methyl
  misc_feature (10)..(11): 2'-deoxy-2'-Fluoro
  misc_feature (12)..(12): 2'-O-methyl
  misc_feature (13)..(13): 2'-deoxy-2'-Fluoro
  misc_feature (14)..(14): 2'-O-methyl
  misc_feature (15)..(19): 2'-deoxy-2'-Fluoro
  misc_feature (1)..(19): ribonucleotide unmodified or modified as described for this sequence
  misc_feature (21)..(21): 3'-3 attached terminal deoxyabasic moeity
gcugagguguugugucuuctt

SEQ ID NO: 1617 - DNA, 21 bp, Artificial Sequence
  Synthetic
  misc_feature (1)..(2): 2'-deoxy-2'-Fluoro
  misc_feature (3)..(3): 2'-O-methyl
  misc_feature (4)..(5): 2'-deoxy-2'-Fluoro
  misc_feature (6)..(10): 2'-O-methyl
  misc_feature (11)..(14): 2'-deoxy-2'-Fluoro
  misc_feature (15)..(15): 2'-O-methyl
  misc_feature (16)..(16): 2'-deoxy-2'-Fluoro
  misc_feature (17)..(17): 2'-O-methyl
  misc_feature (18)..(18): 2'-deoxy-2'-Fluoro
  misc_feature (19)..(19): 2'-O-methyl
  misc_feature (1)..(19): ribonucleotide unmodified or modified as described for this sequence
  misc_feature (21)..(21): 3'-3 attached terminal deoxyabasic moeity
cugucaggaacccugugugtt

SEQ ID NO: 1618 - DNA, 21 bp, Artificial Sequence
  Synthetic
  misc_feature (1)..(2): 2'-O-methyl
  misc_feature (3)..(3): 2'-deoxy-2'-Fluoro
  misc_feature (4)..(4): 2'-O-methyl
  misc_feature (5)..(6): 2'-deoxy-2'-Fluoro
  misc_feature (7)..(8): 2'-O-methyl
  misc_feature (9)..(9): 2'-deoxy-2'-Fluoro
  misc_feature (10)..(11): 2'-O-methyl
  misc_feature (12)..(13): 2'-deoxy-2'-Fluoro
  misc_feature (14)..(17): 2'-O-methyl
  misc_feature (18)..(19): 2'-deoxy-2'-Fluoro
  misc_feature (1)..(19): ribonucleotide unmodified or modified as described for this sequence
  misc_feature (21)..(21): 3'-3 attached terminal deoxyabasic moeity
gaugccagugacuagagcctt

SEQ ID NO: 1619 - DNA, 21 bp, Artificial Sequence
  Synthetic
  misc_feature (1)..(6): 2'-deoxy-2'-Fluoro
  misc_feature (7)..(11): 2'-O-methyl
  misc_feature (12)..(13): 2'-deoxy-2'-Fluoro
  misc_feature (14)..(16): 2'-O-methyl
  misc_feature (17)..(18): 2'-deoxy-2'-Fluoro
  misc_feature (19)..(19): 2'-O-methyl
  misc_feature (1)..(19): ribonucleotide unmodified or modified as described for this sequence
  misc_feature (21)..(21): 3'-3 attached terminal deoxyabasic moeity
uuuucuaaaagcugggccatt

SEQ ID NO: 1620 - DNA, 21 bp, Artificial Sequence
  Synthetic
  misc_feature (1)..(1): 2'-O-methyl
  misc_feature (2)..(2): 2'-deoxy-2'-Fluoro
  misc_feature (3)..(3): 2'-O-methyl
  misc_feature (4)..(5): 2'-deoxy-2'-Fluoro
  misc_feature (6)..(8): 2'-O-methyl
  misc_feature (9)..(10): 2'-deoxy-2'-Fluoro
  misc_feature (11)..(12): 2'-O-methyl
  misc_feature (13)..(16): 2'-deoxy-2'-Fluoro
  misc_feature (17)..(17): 2'-O-methyl
  misc_feature (18)..(18): 2'-deoxy-2'-Fluoro
  misc_feature (19)..(19): 2'-O-methyl
  misc_feature (1)..(19): ribonucleotide unmodified or modified as described for this sequence
  misc_feature (21)..(21): 3'-3 attached terminal deoxyabasic moeity
acaccgagucaacuccacatt

SEQ ID NO: 1621 - DNA, 21 bp, Artificial Sequence
  Synthetic
  misc_feature (1)..(1): 2'-deoxy-2'-Fluoro
  misc_feature (2)..(5): 2'-O-methyl
  misc_feature (6)..(6): 2'-deoxy-2'-Fluoro
  misc_feature (7)..(9): 2'-O-methyl
  misc_feature (10)..(15): 2'-deoxy-2'-Fluoro
  misc_feature (16)..(16): 2'-O-methyl
  misc_feature (17)..(18): 2'-deoxy-2'-Fluoro
  misc_feature (19)..(19): 2'-O-methyl
  misc_feature (1)..(19): ribonucleotide unmodified or modified as described for this sequence
  misc_feature (21)..(21): 3'-3 attached terminal deoxyabasic moeity
caaggcaaauuucucaccatt

SEQ ID NO: 1622 - DNA, 21 bp, Artificial Sequence
  Synthetic
  misc_feature (1)..(2): 2'-O-methyl
  misc_feature (3)..(4): 2'-deoxy-2'-Fluoro
  misc_feature (5)..(5): 2'-O-methyl
  misc_feature (6)..(6): 2'-deoxy-2'-Fluoro
  misc_feature (7)..(8): 2'-O-methyl
  misc_feature (9)..(9): 2'-deoxy-2'-Fluoro
  misc_feature (10)..(11): 2'-O-methyl
  misc_feature (12)..(13): 2'-deoxy-2'-Fluoro
  misc_feature (14)..(14): 2'-O-methyl
  misc_feature (15)..(15): 2'-deoxy-2'-Fluoro
  misc_feature (16)..(16): 2'-O-methyl
  misc_feature (17)..(17): 2'-deoxy-2'-Fluoro
  misc_feature (18)..(19): 2'-O-methyl
  misc_feature (1)..(19): ribonucleotide unmodified or modified as described for this sequence
  misc_feature (21)..(21): 3'-3 attached terminal deoxyabasic moeity
agcuguaacagucaugcgatt

SEQ ID NO: 1623 - DNA, 21 bp, Artificial Sequence
  Synthetic
  misc_feature (1)..(19): ribonucleotide unmodified or modified as described for this sequence
  misc_feature (21)..(21): 3'-3 attached terminal deoxyabasic moeity
uucucuggcaguaggucugtt

SEQ ID NO: 1624 - DNA, 21 bp, Artificial Sequence
  Synthetic
  misc_feature (1)..(19): ribonucleotide unmodified or modified as described for this sequence
  misc_feature (21)..(21): 3'-3 attached terminal deoxyabasic moeity
gcugagguguugugucuuctt

SEQ ID NO: 1625 - DNA, 21 bp, Artificial Sequence
  Synthetic
  misc_feature (1)..(19): ribonucleotide unmodified or modified as described for this sequence
  misc_feature (21)..(21): 3'-3 attached terminal deoxyabasic moeity
cugucaggaacccugugugtt

SEQ ID NO: 1626 - DNA, 21 bp, Artificial Sequence
  Synthetic
  misc_feature (1)..(19): ribonucleotide unmodified or modified as described for this sequence
  misc_feature (21)..(21): 3'-3 attached terminal deoxyabasic moeity
gaugccagugacuagagcctt

SEQ ID NO: 1627 - DNA, 21 bp, Artificial Sequence
  Synthetic
  misc_feature (1)..(19): ribonucleotide unmodified or modified as described for this sequence
  misc_feature (21)..(21): 3'-3 attached terminal deoxyabasic moeity
uuuucuaaaagcugggccatt

SEQ ID NO: 1628 - DNA, 21 bp, Artificial Sequence
  Synthetic
  misc_feature (1)..(19): ribonucleotide unmodified or modified as described for this sequence
  misc_feature (21)..(21): 3'-3 attached terminal deoxyabasic moeity
acaccgagucaacuccacatt

SEQ ID NO: 1629 - DNA, 21 bp, Artificial Sequence
  Synthetic
  misc_feature (1)..(19): ribonucleotide unmodified or modified as described for this sequence
  misc_feature (21)..(21): 3'-3 attached terminal deoxyabasic moeity
caaggcaaauuucucaccatt

SEQ ID NO: 1630 - DNA, 21 bp, Artificial Sequence
  Synthetic
  misc_feature (1)..(19): ribonucleotide unmodified or modified as described for this sequence
  misc_feature (21)..(21): 3'-3 attached terminal deoxyabasic moeity
agcuguaacagucaugcgatt

SEQ ID NO: 1631 - DNA, 21 bp, Artificial Sequence
  Synthetic
  misc_feature (1)..(19): ribonucleotide unmodified or modified as described for this sequence
uucgaacaucagaccuacutt

SEQ ID NO: 1632 - DNA, 21 bp, Artificial Sequence
  Synthetic
  misc_feature (1)..(19): ribonucleotide unmodified or modified as described for this sequence
aacuccaagggcuauaccatt

SEQ ID NO: 1633 - DNA, 21 bp, Artificial Sequence
  Synthetic
  misc_feature (1)..(19): ribonucleotide unmodified or modified as described for this sequence
agggcuauaccaaguccautt

SEQ ID NO: 1634 - DNA, 21 bp, Artificial Sequence
  Synthetic
  misc_feature (1)..(19): ribonucleotide unmodified or modified as described for this sequence
ggcuauaccaaguccaucgtt

SEQ ID NO: 1635 - DNA, 21 bp, Artificial Sequence
  Synthetic
  misc_feature (1)..(19): ribonucleotide unmodified or modified as described for this sequence
cuggagcaguacuaugacctt

SEQ ID NO: 1636 - DNA, 21 bp, Artificial Sequence
  Synthetic
  misc_feature (1)..(19): ribonucleotide unmodified or modified as described for this sequence
cccgccagacuguuagaaatt

SEQ ID NO: 1637 - DNA, 21 bp, Artificial Sequence
  Synthetic
  misc_feature (1)..(19): ribonucleotide unmodified or modified as described for this sequence
cuguguguggugagcagaatt

SEQ ID NO: 1638 - DNA, 21 bp, Artificial Sequence
  Synthetic
  misc_feature (1)..(19): ribonucleotide unmodified or modified as described for this sequence
guguggugagcagaaguggtt

SEQ ID NO: 1639 - DNA, 21 bp, Artificial Sequence
  Synthetic
  misc_feature (1)..(19): ribonucleotide unmodified or modified as described for this sequence
aguaggucugauguucgaatt

SEQ ID NO: 1640 - DNA, 21 bp, Artificial Sequence
  Synthetic
  misc_feature (1)..(19): ribonucleotide unmodified or modified as described for this sequence
ugguauagcccuuggaguutt

SEQ ID NO: 1641 - DNA, 21 bp, Artificial Sequence
  Synthetic
  misc_feature (1)..(19): ribonucleotide unmodified or modified as described for this sequence
auggacuugguauagcccutt

SEQ ID NO: 1642 - DNA, 21 bp, Artificial Sequence
  Synthetic
  misc_feature (1)..(19): ribonucleotide unmodified or modified as described for this sequence
cgauggacuugguauagcctt

SEQ ID NO: 1643 - DNA, 21 bp, Artificial Sequence
  Synthetic
  misc_feature (1)..(19): ribonucleotide unmodified or modified as described for this sequence
ggucauaguacugcuccagtt

SEQ ID NO: 1644 - DNA, 21 bp, Artificial Sequence
  Synthetic
  misc_feature (1)..(19): ribonucleotide unmodified or modified as described for this sequence
uuucuaacagucuggcgggtt

SEQ ID NO: 1645 - DNA, 21 bp, Artificial Sequence
  Synthetic
  misc_feature (1)..(19): ribonucleotide unmodified or modified as described for this sequence
uucugcucaccacacacagtt

SEQ ID NO: 1646 - DNA, 21 bp, Artificial Sequence
  Synthetic
  misc_feature (1)..(19): ribonucleotide unmodified or modified as described for this sequence
ccacuucugcucaccacactt

SEQ ID NO: 1647 - DNA, 21 bp, Artificial Sequence
  Synthetic
  misc_feature (1)..(1): 5'-3 attached terminal deoxyabasic moeity
  misc_feature (1)..(3): 2'-deoxy-2'-Fluoro
  misc_feature (7)..(7): 2'-deoxy-2'-Fluoro
  misc_feature (9)..(10): 2'-deoxy-2'-Fluoro
  misc_feature (14)..(16): 2'-deoxy-2'-Fluoro
  misc_feature (18)..(19): 2'-deoxy-2'-Fluoro
  misc_feature (1)..(19): ribonucleotide unmodified or modified as described for this sequence
  misc_feature (21)..(21): 3'-3 attached terminal deoxyabasic moeity
uucgaacaucagaccuacutt

SEQ ID NO: 1648 - DNA, 21 bp, Artificial Sequence
  Synthetic
  misc_feature (1)..(1): 5'-3 attached terminal deoxyabasic moeity
  misc_feature (3)..(6): 2'-deoxy-2'-Fluoro
  misc_feature (12)..(13): 2'-deoxy-2'-Fluoro
  misc_feature (15)..(15): 2'-deoxy-2'-Fluoro
  misc_feature (17)..(18): 2'-deoxy-2'-Fluoro
  misc_feature (1)..(19): ribonucleotide unmodified or modified as described for this sequence
  misc_feature (21)..(21): 3'-3 attached terminal deoxyabasic moeity
aacuccaagggcuauaccatt

SEQ ID NO: 1649 - DNA, 21 bp, Artificial Sequence
  Synthetic
  misc_feature (1)..(1): 5'-3 attached terminal deoxyabasic moeity
  misc_feature (5)..(6): 2'-deoxy-2'-Fluoro
  misc_feature (8)..(8): 2'-deoxy-2'-Fluoro
  misc_feature (10)..(11): 2'-deoxy-2'-Fluoro
  misc_feature (15)..(17): 2'-deoxy-2'-Fluoro
  misc_feature (19)..(19): 2'-deoxy-2'-Fluoro
  misc_feature (1)..(19): ribonucleotide unmodified or modified as described for this sequence
  misc_feature (21)..(21): 3'-3 attached terminal deoxyabasic moeity
agggcuauaccaaguccautt

SEQ ID NO: 1650 - DNA, 21 bp, Artificial Sequence
  Synthetic
  misc_feature (1)..(1): 5'-3 attached terminal deoxyabasic moeity
  misc_feature (3)..(4): 2'-deoxy-2'-Fluoro
  misc_feature (6)..(6): 2'-deoxy-2'-Fluoro
  misc_feature (8)..(9): 2'-deoxy-2'-Fluoro
  misc_feature (13)..(15): 2'-deoxy-2'-Fluoro
  misc_feature (17)..(18): 2'-deoxy-2'-Fluoro
  misc_feature (1)..(19): ribonucleotide unmodified or modified as described for this sequence
  misc_feature (21)..(21): 3'-3 attached terminal deoxyabasic moeity
ggcuauaccaaguccaucgtt

SEQ ID NO: 1651 - DNA, 21 bp, Artificial Sequence
  Synthetic
  misc_feature (1)..(1): 5'-3 attached terminal deoxyabasic moeity
  misc_feature (1)..(2): 2'-deoxy-2'-Fluoro
  misc_feature (7)..(7): 2'-deoxy-2'-Fluoro
  misc_feature (10)..(10): 2'-deoxy-2'-Fluoro
  misc_feature (12)..(13): 2'-deoxy-2'-Fluoro
  misc_feature (15)..(15): 2'-deoxy-2'-Fluoro
  misc_feature (18)..(19): 2'-deoxy-2'-Fluoro
  misc_feature (1)..(19): ribonucleotide unmodified or modified as described for this sequence
  misc_feature (21)..(21): 3'-3 attached terminal deoxyabasic moeity
cuggagcaguacuaugacctt

SEQ ID NO: 1652 - DNA, 21 bp, Artificial Sequence
  Synthetic
  misc_feature (1)..(3): 2'-deoxy-2'-Fluoro
  misc_feature (1)..(1): 5'-3 attached terminal deoxyabasic moeity
  misc_feature (5)..(6): 2'-deoxy-2'-Fluoro
  misc_feature (10)..(11): 2'-deoxy-2'-Fluoro
  misc_feature (13)..(14): 2'-deoxy-2'-Fluoro
  misc_feature (1)..(19): ribonucleotide unmodified or modified as described for this sequence
  misc_feature (21)..(21): 3'-3 attached terminal deoxyabasic moeity
cccgccagacuguuagaaatt

SEQ ID NO: 1653 - DNA, 21 bp, Artificial Sequence
  Synthetic
  misc_feature (1)..(1): 5'-3 attached terminal deoxyabasic moeity
  misc_feature (1)..(2): 2'-deoxy-2'-Fluoro
  misc_feature (4)..(4): 2'-deoxy-2'-Fluoro
  misc_feature (6)..(6): 2'-deoxy-2'-Fluoro
  misc_feature (8)..(8): 2'-deoxy-2'-Fluoro
  misc_feature (11)..(11): 2'-deoxy-2'-Fluoro
  misc_feature (15)..(15): 2'-deoxy-2'-Fluoro
  misc_feature (1)..(19): ribonucleotide unmodified or modified as described for this sequence
  misc_feature (21)..(21): 3'-3 attached terminal deoxyabasic moeity
cuguguguggugagcagaatt

SEQ ID NO: 1654 - DNA, 21 bp, Artificial Sequence
  Synthetic
  misc_feature (1)..(1): 5'-3 attached terminal deoxyabasic moeity
  misc_feature (2)..(2): 2'-deoxy-2'-Fluoro
  misc_feature (4)..(4): 2'-deoxy-2'-Fluoro
  misc_feature (7)..(7): 2'-deoxy-2'-Fluoro
  misc_feature (11)..(11): 2'-deoxy-2'-Fluoro
  misc_feature (17)..(17): 2'-deoxy-2'-Fluoro
  misc_feature (1)..(19): ribonucleotide unmodified or modified as described for this sequence
  misc_feature (21)..(21): 3'-3 attached terminal deoxyabasic moeity
guguggugagcagaaguggtt

SEQ ID NO: 1655 - DNA, 21 bp, Artificial Sequence
  Synthetic
  misc_feature (3)..(3): 2'-deoxy-2'-Fluoro
  misc_feature (7)..(9): 2'-deoxy-2'-Fluoro
  misc_feature (12)..(12): 2'-deoxy-2'-Fluoro
  misc_feature (14)..(16): 2'-deoxy-2'-Fluoro
  misc_feature (20)..(20): Phosphorothioate 3'-Internucleotide Linkage
  misc_feature (1)..(19): ribonucleotide unmodified or modified as described for this sequence
aguaggucugauguucgaatt

SEQ ID NO: 1656 - DNA, 21 bp, Artificial Sequence
  Synthetic
  misc_feature (1)..(1): 2'-deoxy-2'-Fluoro
  misc_feature (4)..(4): 2'-deoxy-2'-Fluoro
  misc_feature (6)..(6): 2'-deoxy-2'-Fluoro
  misc_feature (9)..(13): 2'-deoxy-2'-Fluoro
  misc_feature (18)..(19): 2'-deoxy-2'-Fluoro
  misc_feature (20)..(20): Phosphorothioate 3'-Internucleotide Linkage
  misc_feature (1)..(19): ribonucleotide unmodified or modified as described for this sequence
ugguauagcccuuggaguutt

SEQ ID NO: 1657 - DNA, 21 bp, Artificial Sequence
  Synthetic
  misc_feature (2)..(2): 2'-deoxy-2'-Fluoro
  misc_feature (6)..(8): 2'-deoxy-2'-Fluoro
  misc_feature (11)..(11): 2'-deoxy-2'-Fluoro
  misc_feature (13)..(13): 2'-deoxy-2'-Fluoro
  misc_feature (16)..(19): 2'-deoxy-2'-Fluoro
  misc_feature (20)..(20): Phosphorothioate 3'-Internucleotide Linkage
  misc_feature (1)..(19): ribonucleotide unmodified or modified as described for this sequence
auggacuugguauagcccutt

SEQ ID NO: 1658 - DNA, 21 bp, Artificial Sequence
  Description of Artificial Sequence: siNA sense region
  misc_feature (1)..(1): 2'-deoxy-2'-Fluoro
  misc_feature (4)..(4): 2'-deoxy-2'-Fluoro
  misc_feature (8)..(10): 2'-deoxy-2'-Fluoro
  misc_feature (13)..(13): 2'-deoxy-2'-Fluoro
  misc_feature (15)..(15): 2'-deoxy-2'-Fluoro
  misc_feature (18)..(19): 2'-deoxy-2'-Fluoro
  misc_feature (20)..(20): Phosphorothioate 3'-Internucleotide Linkage
  misc_feature (1)..(19): ribonucleotide unmodified or modified as described for this sequence
cgauggacuugguauagcctt

SEQ ID NO: 1659 - DNA, 21 bp, Artificial Sequence
  Synthetic
  misc_feature (3)..(4): 2'-deoxy-2'-Fluoro
  misc_feature (6)..(6): 2'-deoxy-2'-Fluoro
  misc_feature (9)..(9): 2'-deoxy-2'-Fluoro
  misc_feature (11)..(12): 2'-deoxy-2'-Fluoro
  misc_feature (14)..(17): 2'-deoxy-2'-Fluoro
  misc_feature (20)..(20): Phosphorothioate 3'-Internucleotide Linkage
  misc_feature (1)..(19): ribonucleotide unmodified or modified as described for this sequence
ggucauaguacugcuccagtt

SEQ ID NO: 1660 - DNA, 21 bp, Artificial Sequence
  Synthetic
  misc_feature (1)..(5): 2'-deoxy-2'-Fluoro
  misc_feature (8)..(8): 2'-deoxy-2'-Fluoro
  misc_feature (11)..(13): 2'-deoxy-2'-Fluoro
  misc_feature (16)..(16): 2'-deoxy-2'-Fluoro
  misc_feature (20)..(20): Phosphorothioate 3'-Internucleotide Linkage
  misc_feature (1)..(19): ribonucleotide unmodified or modified as described for this sequence
uuucuaacagucuggcgggtt

SEQ ID NO: 1661 - DNA, 21 bp, Artificial Sequence
  Synthetic
  misc_feature (1)..(4): 2'-deoxy-2'-Fluoro
  misc_feature (6)..(8): 2'-deoxy-2'-Fluoro
  misc_feature (10)..(11): 2'-deoxy-2'-Fluoro
  misc_feature (13)..(13): 2'-deoxy-2'-Fluoro
  misc_feature (15)..(15): 2'-deoxy-2'-Fluoro
  misc_feature (17)..(17): 2'-deoxy-2'-Fluoro
  misc_feature (20)..(20): Phosphorothioate 3'-Internucleotide Linkage
  misc_feature (1)..(19): ribonucleotide unmodified or modified as described for this sequence
uucugcucaccacacacagtt

SEQ ID NO: 1662 - DNA, 21 bp, Artificial Sequence
  Synthetic
  misc_feature (1)..(2): 2'-deoxy-2'-Fluoro
  misc_feature (4)..(8): 2'-deoxy-2'-Fluoro
  misc_feature (10)..(12): 2'-deoxy-2'-Fluoro
  misc_feature (14)..(15): 2'-deoxy-2'-Fluoro
  misc_feature (17)..(17): 2'-deoxy-2'-Fluoro
  misc_feature (19)..(19): 2'-deoxy-2'-Fluoro
  misc_feature (20)..(20): Phosphorothioate 3'-Internucleotide Linkage
  misc_feature (1)..(19): ribonucleotide unmodified or modified as described for this sequence
ccacuucugcucaccacactt

SEQ ID NO: 1663 - DNA, 21 bp, Artificial Sequence
  Synthetic
  misc_feature (1)..(3): 2'-deoxy-2'-Fluoro
  misc_feature (1)..(1): 5'-3 attached terminal deoxyabasic moeity
  misc_feature (4)..(6): deoxy
  misc_feature (7)..(7): 2'-deoxy-2'-Fluoro
  misc_feature (8)..(8): deoxy
  misc_feature (9)..(10): 2'-deoxy-2'-Fluoro
  misc_feature (11)..(13): deoxy
  misc_feature (14)..(16): 2'-deoxy-2'-Fluoro
  misc_feature (17)..(17): deoxy
  misc_feature (18)..(19): 2'-deoxy-2'-Fluoro
  misc_feature (1)..(19): ribonucleotide unmodified or modified as described for this sequence
  misc_feature (21)..(21): 3'-3 attached terminal deoxyabasic moeity
uucgaacaucagaccuacutt

SEQ ID NO: 1664 - DNA, 21 bp, Artificial Sequence
  Synthetic
  misc_feature (1)..(1): 5'-3 attached terminal deoxyabasic moeity
  misc_feature (1)..(2): deoxy
  misc_feature (3)..(6): 2'-deoxy-2'-Fluoro
  misc_feature (7)..(11): deoxy
  misc_feature (12)..(13): 2'-deoxy-2'-Fluoro
  misc_feature (14)..(14): deoxy
  misc_feature (15)..(15): 2'-deoxy-2'-Fluoro
  misc_feature (16)..(16): deoxy
  misc_feature (17)..(18): 2'-deoxy-2'-Fluoro
  misc_feature (19)..(19): deoxy
  misc_feature (1)..(19): ribonucleotide unmodified or modified as described for this sequence
  misc_feature (21)..(21): 3'-3 attached terminal deoxyabasic moeity
aacuccaagggcuauaccatt

SEQ ID NO: 1665 - DNA, 21 bp, Artificial Sequence
  Synthetic
  misc_feature (1)..(4): deoxy
  misc_feature (1)..(1): 5'-3 attached terminal deoxyabasic moeity
  misc_feature (5)..(6): 2'-deoxy-2'-Fluoro
  misc_feature (7)..(7): deoxy
  misc_feature (8)..(8): 2'-deoxy-2'-Fluoro
  misc_feature (9)..(9): deoxy
  misc_feature (10)..(11): 2'-deoxy-2'-Fluoro
  misc_feature (12)..(14): deoxy
  misc_feature (15)..(17): 2'-deoxy-2'-Fluoro
  misc_feature (18)..(18): deoxy
  misc_feature (19)..(19): 2'-deoxy-2'-Fluoro
  misc_feature (1)..(19): ribonucleotide unmodified or modified as described for this sequence
  misc_feature (21)..(21): 3'-3 attached terminal deoxyabasic moeity
agggcuauaccaaguccautt

SEQ ID NO: 1666 - DNA, 21 bp, Artificial Sequence
  Synthetic
  misc_feature (1)..(1): 5'-3 attached terminal deoxyabasic moeity
  misc_feature (1)..(2): deoxy
  misc_feature (3)..(4): 2'-deoxy-2'-Fluoro
  misc_feature (5)..(5): deoxy
  misc_feature (6)..(6): 2'-deoxy-2'-Fluoro
  misc_feature (7)..(7): deoxy
  misc_feature (8)..(9): 2'-deoxy-2'-Fluoro
  misc_feature (10)..(12): deoxy
  misc_feature (13)..(15): 2'-deoxy-2'-Fluoro
  misc_feature (16)..(16): deoxy
  misc_feature (17)..(18): 2'-deoxy-2'-Fluoro
  misc_feature (19)..(19): deoxy
  misc_feature (1)..(19): ribonucleotide unmodified or modified as described for this sequence
  misc_feature (21)..(21): 3'-3 attached terminal deoxyabasic moeity
ggcuauaccaaguccaucgtt

SEQ ID NO: 1667 - DNA, 21 bp, Artificial Sequence
  Synthetic
  misc_feature (1)..(2): 2'-deoxy-2'-Fluoro
  misc_feature (1)..(1): 5'-3 attached terminal deoxyabasic moeity
  misc_feature (3)..(6): deoxy
  misc_feature (7)..(7): 2'-deoxy-2'-Fluoro
  misc_feature (8)..(9): deoxy
  misc_feature (10)..(10): 2'-deoxy-2'-Fluoro
  misc_feature (11)..(11): deoxy
  misc_feature (12)..(13): 2'-deoxy-2'-Fluoro
  misc_feature (14)..(14): deoxy
  misc_feature (15)..(15): 2'-deoxy-2'-Fluoro
  misc_feature (16)..(17): deoxy
  misc_feature (18)..(19): 2'-deoxy-2'-Fluoro
  misc_feature (1)..(19): ribonucleotide unmodified or modified as described for this sequence
  misc_feature (21)..(21): 3'-3 attached terminal deoxyabasic moeity
cuggagcaguacuaugacctt

SEQ ID NO: 1668 - DNA, 21 bp, Artificial Sequence
  Synthetic
  misc_feature (1)..(1): 5'-3 attached terminal deoxyabasic moeity
  misc_feature (1)..(3): 2'-deoxy-2'-Fluoro
  misc_feature (4)..(4): deoxy
  misc_feature (5)..(6): 2'-deoxy-2'-Fluoro
  misc_feature (7)..(9): deoxy
  misc_feature (10)..(11): 2'-deoxy-2'-Fluoro
  misc_feature (12)..(12): deoxy
  misc_feature (13)..(14): 2'-deoxy-2'-Fluoro
  misc_feature (15)..(19): deoxy
  misc_feature (1)..(19): ribonucleotide unmodified or modified as described for this sequence
  misc_feature (21)..(21): 3'-3 attached terminal deoxyabasic moeity
cccgccagacuguuagaaatt

SEQ ID NO: 1669 - DNA, 21 bp, Artificial Sequence
  Synthetic
  misc_feature (1)..(2): 2'-deoxy-2'-Fluoro
  misc_feature (1)..(1): 5'-3 attached terminal deoxyabasic moeity
  misc_feature (3)..(3): deoxy
  misc_feature (4)..(4): 2'-deoxy-2'-Fluoro
  misc_feature (5)..(5): deoxy
  misc_feature (6)..(6): 2'-deoxy-2'-Fluoro
  misc_feature (7)..(7): deoxy
  misc_feature (8)..(8): 2'-deoxy-2'-Fluoro
  misc_feature (9)..(10): deoxy
  misc_feature (11)..(11): 2'-deoxy-2'-Fluoro
  misc_feature (12)..(14): deoxy
  misc_feature (15)..(15): 2'-deoxy-2'-Fluoro
  misc_feature (16)..(19): deoxy
  misc_feature (1)..(19): ribonucleotide unmodified or modified as described for this sequence
  misc_feature (21)..(21): 3'-3 attached terminal deoxyabasic moeity
cuguguguggugagcagaatt

SEQ ID NO: 1670 - DNA, 21 bp, Artificial Sequence
  Synthetic
  misc_feature (1)..(1): 5'-3 attached terminal deoxyabasic moeity
  misc_feature (1)..(1): deoxy
  misc_feature (2)..(2): 2'-deoxy-2'-Fluoro
  misc_feature (3)..(3): deoxy
  misc_feature (4)..(4): 2'-deoxy-2'-Fluoro
  misc_feature (5)..(6): deoxy
  misc_feature (7)..(7): 2'-deoxy-2'-Fluoro
  misc_feature (8)..(10): deoxy
  misc_feature (11)..(11): 2'-deoxy-2'-Fluoro
  misc_feature (12)..(16): deoxy
  misc_feature (17)..(17): 2'-deoxy-2'-Fluoro
  misc_feature (18)..(19): deoxy
  misc_feature (1)..(19): ribonucleotide unmodified or modified as described for this sequence
  misc_feature (21)..(21): 3'-3 attached terminal deoxyabasic moeity
guguggugagcagaaguggtt

SEQ ID NO: 1671 - DNA, 21 bp, Artificial Sequence
  Synthetic
  misc_feature (1)..(2): deoxy
  misc_feature (3)..(3): 2'-deoxy-2'-Fluoro
  misc_feature (4)..(6): deoxy
  misc_feature (7)..(9): 2'-deoxy-2'-Fluoro
  misc_feature (10)..(11): deoxy
  misc_feature (12)..(12): 2'-deoxy-2'-Fluoro
  misc_feature (13)..(13): deoxy
  misc_feature (14)..(16): 2'-deoxy-2'-Fluoro
  misc_feature (17)..(19): deoxy
  misc_feature (20)..(20): Phosphorothioate 3'-Internucleotide Linkage
  misc_feature (1)..(19): ribonucleotide unmodified or modified as described for this sequence
aguaggucugauguucgaatt

SEQ ID NO: 1672 - DNA, 21 bp, Artificial Sequence
  Synthetic
  misc_feature (1)..(1): 2'-deoxy-2'-Fluoro
  misc_feature (2)..(3): deoxy
  misc_feature (4)..(4): 2'-deoxy-2'-Fluoro
  misc_feature (5)..(5): deoxy
  misc_feature (6)..(6): 2'-deoxy-2'-Fluoro
  misc_feature (7)..(8): deoxy
  misc_feature (9)..(13): 2'-deoxy-2'-Fluoro
  misc_feature (14)..(17): deoxy
  misc_feature (18)..(19): 2'-deoxy-2'-Fluoro
  misc_feature (20)..(20): Phosphorothioate 3'-Internucleotide Linkage
  misc_feature (1)..(19): ribonucleotide unmodified or modified as described for this sequence
ugguauagcccuuggaguutt

SEQ ID NO: 1673 - DNA, 21 bp, Artificial Sequence
  Synthetic
  misc_feature (1)..(1): deoxy
  misc_feature (2)..(2): 2'-deoxy-2'-Fluoro
  misc_feature (3)..(5): deoxy
  misc_feature (6)..(8): 2'-deoxy-2'-Fluoro
  misc_feature (9)..(10): deoxy
  misc_feature (11)..(11): 2'-deoxy-2'-Fluoro
  misc_feature (12)..(12): deoxy
  misc_feature (13)..(13): 2'-deoxy-2'-Fluoro
  misc_feature (14)..(15): deoxy
  misc_feature (16)..(19): 2'-deoxy-2'-Fluoro
  misc_feature (20)..(20): Phosphorothioate 3'-Internucleotide Linkage
  misc_feature (1)..(19): ribonucleotide unmodified or modified as described for this sequence
auggacuugguauagcccutt

SEQ ID NO: 1674 - DNA, 21 bp, Artificial Sequence
  Synthetic
  misc_feature (1)..(1): 2'-deoxy-2'-Fluoro
  misc_feature (2)..(3): deoxy
  misc_feature (4)..(4): 2'-deoxy-2'-Fluoro
  misc_feature (5)..(7): deoxy
  misc_feature (8)..(10): 2'-deoxy-2'-Fluoro
  misc_feature (11)..(12): deoxy
  misc_feature (13)..(13): 2'-deoxy-2'-Fluoro
  misc_feature (14)..(14): deoxy
  misc_feature (15)..(15): 2'-deoxy-2'-Fluoro
  misc_feature (16)..(17): deoxy
  misc_feature (18)..(19): 2'-deoxy-2'-Fluoro
  misc_feature (20)..(20): Phosphorothioate 3'-Internucleotide Linkage
  misc_feature (1)..(19): ribonucleotide unmodified or modified as described for this sequence
cgauggacuugguauagcctt

SEQ ID NO: 1675 - DNA, 21 bp, Artificial Sequence
  Synthetic
  misc_feature (1)..(2): deoxy
  misc_feature (3)..(4): 2'-deoxy-2'-Fluoro
  misc_feature (5)..(5): deoxy
  misc_feature (6)..(6): 2'-deoxy-2'-Fluoro
  misc_feature (7)..(8): deoxy
  misc_feature (9)..(9): 2'-deoxy-2'-Fluoro
  misc_feature (10)..(10): deoxy
  misc_feature (11)..(12): 2'-deoxy-2'-Fluoro
  misc_feature (13)..(13): deoxy
  misc_feature (14)..(17): 2'-deoxy-2'-Fluoro
  misc_feature (18)..(19): deoxy
  misc_feature (20)..(20): Phosphorothioate 3'-Internucleotide Linkage
  misc_feature (1)..(19): ribonucleotide unmodified or modified as described for this sequence
ggucauaguacugcuccagtt

SEQ ID NO: 1676 - DNA, 21 bp, Artificial Sequence
  Synthetic
  misc_feature (1)..(5): 2'-deoxy-2'-Fluoro
  misc_feature (6)..(7): deoxy
  misc_feature (8)..(8): 2'-deoxy-2'-Fluoro
  misc_feature (9)..(10): deoxy
  misc_feature (11)..(13): 2'-deoxy-2'-Fluoro
  misc_feature (14)..(15): deoxy
  misc_feature (16)..(16): 2'-deoxy-2'-Fluoro
  misc_feature (17)..(19): deoxy
  misc_feature (20)..(20): Phosphorothioate 3'-Internucleotide Linkage
  misc_feature (1)..(19): ribonucleotide unmodified or modified as described for this sequence
uuucuaacagucuggcgggtt

SEQ ID NO: 1677 - DNA, 21 bp, Artificial Sequence
  Synthetic
  misc_feature (1)..(4): 2'-deoxy-2'-Fluoro
  misc_feature (5)..(5): deoxy
  misc_feature (6)..(8): 2'-deoxy-2'-Fluoro
  misc_feature (9)..(9): deoxy
  misc_feature (10)..(11): 2'-deoxy-2'-Fluoro
  misc_feature (12)..(12): deoxy
  misc_feature (13)..(13): 2'-deoxy-2'-Fluoro
  misc_feature (14)..(14): deoxy
  misc_feature (15)..(15): 2'-deoxy-2'-Fluoro
  misc_feature (16)..(16): deoxy
  misc_feature (17)..(17): 2'-deoxy-2'-Fluoro
  misc_feature (18)..(19): deoxy
  misc_feature (20)..(20): Phosphorothioate 3'-Internucleotide Linkage
  misc_feature (20)..(20)
  misc_feature (1)..(19): ribonucleotide unmodified or modified as described for this sequence
uucugcucaccacacacagtt

SEQ ID NO: 1678 - DNA, 21 bp, Artificial Sequence
  Synthetic
  misc_feature (1)..(2): 2'-deoxy-2'-Fluoro
  misc_feature (3)..(3): deoxy
  misc_feature (4)..(8): 2'-deoxy-2'-Fluoro
  misc_feature (9)..(9): deoxy
  misc_feature (10)..(12): 2'-deoxy-2'-Fluoro
  misc_feature (13)..(13): deoxy
  misc_feature (14)..(15): 2'-deoxy-2'-Fluoro
  misc_feature (16)..(16): deoxy
  misc_feature (17)..(17): 2'-deoxy-2'-Fluoro
  misc_feature (18)..(18): deoxy
  misc_feature (19)..(19): 2'-deoxy-2'-Fluoro
  misc_feature (20)..(20): Phosphorothioate 3'-Internucleotide Linkage
  misc_feature (1)..(19): ribonucleotide unmodified or modified as described for this sequence
ccacuucugcucaccacactt

SEQ ID NO: 1679 - DNA, 21 bp, Artificial Sequence
  Synthetic
  misc_feature (1)..(3): 2'-deoxy-2'-Fluoro
  misc_feature (1)..(1): 5'-3 attached terminal deoxyabasic moeity
  misc_feature (4)..(6): 2'-O-methyl
  misc_feature (7)..(7): 2'-deoxy-2'-Fluoro
  misc_feature (8)..(8): 2'-O-methyl
  misc_feature (9)..(10): 2'-deoxy-2'-Fluoro
  misc_feature (11)..(13): 2'-O-methyl
  misc_feature (14)..(16): 2'-deoxy-2'-Fluoro
  misc_feature (17)..(17): 2'-O-methyl
  misc_feature (18)..(19): 2'-deoxy-2'-Fluoro
  misc_feature (1)..(19): ribonucleotide unmodified or modified as described for this sequence
  misc_feature (21)..(21): 3'-3 attached terminal deoxyabasic moeity
uucgaacaucagaccuacutt

SEQ ID NO: 1680 - DNA, 21 bp, Artificial Sequence
  Synthetic
  misc_feature (1)..(1): 5'-3 attached terminal deoxyabasic moeity
  misc_feature (1)..(2): 2'-O-methyl
  misc_feature (3)..(6): 2'-deoxy-2'-Fluoro
  misc_feature (7)..(11): 2'-O-methyl
  misc_feature (12)..(13): 2'-deoxy-2'-Fluoro
  misc_feature (14)..(14): 2'-O-methyl
  misc_feature (15)..(15): 2'-deoxy-2'-Fluoro
  misc_feature (16)..(16): 2'-O-methyl
  misc_feature (17)..(18): 2'-deoxy-2'-Fluoro
  misc_feature (19)..(19): 2'-O-methyl
  misc_feature (1)..(19): ribonucleotide unmodified or modified as described for this sequence
  misc_feature (21)..(21): 3'-3 attached terminal deoxyabasic moeity
aacuccaagggcuauaccatt

SEQ ID NO: 1681 - DNA, 21 bp, Artificial Sequence
  Synthetic
  misc_feature (1)..(4): 2'-O-methyl
  misc_feature (1)..(1): 5'-3 attached terminal deoxyabasic moeity
  misc_feature (5)..(6): 2'-deoxy-2'-Fluoro
  misc_feature (7)..(7): 2'-O-methyl
  misc_feature (8)..(8): 2'-deoxy-2'-Fluoro
  misc_feature (9)..(9): 2'-O-methyl
  misc_feature (10)..(11): 2'-deoxy-2'-Fluoro
  misc_feature (12)..(14): 2'-O-methyl
  misc_feature (15)..(17): 2'-deoxy-2'-Fluoro
  misc_feature (18)..(18): 2'-O-methyl
  misc_feature (19)..(19): 2'-deoxy-2'-Fluoro
  misc_feature (1)..(19): ribonucleotide unmodified or modified as described for this sequence
  misc_feature (21)..(21): 3'-3 attached terminal deoxyabasic moeity
agggcuauaccaaguccautt

SEQ ID NO: 1682 - DNA, 21 bp, Artificial Sequence
  Synthetic
  misc_feature (1)..(1): 5'-3 attached terminal deoxyabasic moeity
  misc_feature (1)..(2): 2'-O-methyl
  misc_feature (3)..(4): 2'-deoxy-2'-Fluoro
  misc_feature (5)..(5): 2'-O-methyl
  misc_feature (6)..(6): 2'-deoxy-2'-Fluoro
  misc_feature (7)..(7): 2'-O-methyl
  misc_feature (8)..(9): 2'-deoxy-2'-Fluoro
  misc_feature (10)..(12): 2'-O-methyl
  misc_feature (13)..(15): 2'-deoxy-2'-Fluoro
  misc_feature (16)..(16): 2'-O-methyl
  misc_feature (17)..(18): 2'-deoxy-2'-Fluoro
  misc_feature (19)..(19): 2'-O-methyl
  misc_feature (1)..(19): ribonucleotide unmodified or modified as described for this sequence
  misc_feature (21)..(21): 3'-3 attached terminal deoxyabasic moeity
ggcuauaccaaguccaucgtt

SEQ ID NO: 1683 - DNA, 21 bp, Artificial Sequence
  Synthetic
  misc_feature (1)..(2): 2'-deoxy-2'-Fluoro
  misc_feature (1)..(1): 5'-3 attached terminal deoxyabasic moeity
  misc_feature (3)..(6): 2'-O-methyl
  misc_feature (7)..(7): 2'-deoxy-2'-Fluoro
  misc_feature (8)..(9): 2'-O-methyl
  misc_feature (10)..(10): 2'-deoxy-2'-Fluoro
  misc_feature (11)..(11): 2'-O-methyl
  misc_feature (12)..(13): 2'-deoxy-2'-Fluoro
  misc_feature (14)..(14): 2'-O-methyl
  misc_feature (15)..(15): 2'-deoxy-2'-Fluoro
  misc_feature (16)..(17): 2'-O-methyl
  misc_feature (18)..(19): 2'-deoxy-2'-Fluoro
  misc_feature (1)..(19): ribonucleotide unmodified or modified as described for this sequence
  misc_feature (21)..(21): 3'-3 attached terminal deoxyabasic moeity
cuggagcaguacuaugacctt

SEQ ID NO: 1684 - DNA, 21 bp, Artificial Sequence
  Synthetic
  misc_feature (1)..(1): 5'-3 attached terminal deoxyabasic moeity
  misc_feature (1)..(3): 2'-deoxy-2'-Fluoro
  misc_feature (4)..(4): 2'-O-methyl
  misc_feature (5)..(6): 2'-deoxy-2'-Fluoro
  misc_feature (7)..(9): 2'-O-methyl
  misc_feature (10)..(11): 2'-deoxy-2'-Fluoro
  misc_feature (12)..(12): 2'-O-methyl
  misc_feature (13)..(14): 2'-deoxy-2'-Fluoro
  misc_feature (15)..(19): 2'-O-methyl
  misc_feature (1)..(19): ribonucleotide unmodified or modified as described for this sequence
  misc_feature (21)..(21): 3'-3 attached terminal deoxyabasic moeity
cccgccagacuguuagaaatt

SEQ ID NO: 1685 - DNA, 21 bp, Artificial Sequence
  Synthetic
  misc_feature (1)..(2): 2'-deoxy-2'-Fluoro
  misc_feature (1)..(1): 5'-3 attached terminal deoxyabasic moeity
  misc_feature (3)..(3): 2'-O-methyl
  misc_feature (4)..(4): 2'-deoxy-2'-Fluoro
  misc_feature (5)..(5): 2'-O-methyl
  misc_feature (6)..(6): 2'-deoxy-2'-Fluoro
  misc_feature (7)..(7): 2'-O-methyl
  misc_feature (8)..(8): 2'-deoxy-2'-Fluoro
  misc_feature (9)..(10): 2'-O-methyl
  misc_feature (11)..(11): 2'-deoxy-2'-Fluoro
  misc_feature (12)..(14): 2'-O-methyl
  misc_feature (15)..(15): 2'-deoxy-2'-Fluoro
  misc_feature (16)..(19): 2'-O-methyl
  misc_feature (1)..(19): ribonucleotide unmodified or modified as described for this sequence
  misc_feature (21)..(21): 3'-3 attached terminal deoxyabasic moeity
cuguguguggugagcagaatt

SEQ ID NO: 1686 - DNA, 21 bp, Artificial Sequence
  Synthetic
  misc_feature (1)..(1): 5'-3 attached terminal deoxyabasic moeity
  misc_feature (1)..(1): 2'-O-methyl
  misc_feature (2)..(2): 2'-deoxy-2'-Fluoro
  misc_feature (3)..(3): 2'-O-methyl
  misc_feature (4)..(4): 2'-deoxy-2'-Fluoro
  misc_feature (5)..(6): 2'-O-methyl
  misc_feature (7)..(7): 2'-deoxy-2'-Fluoro
  misc_feature (8)..(10): 2'-O-methyl
  misc_feature (11)..(11): 2'-deoxy-2'-Fluoro
  misc_feature (12)..(16): 2'-O-methyl
  misc_feature (17)..(17): 2'-deoxy-2'-Fluoro
  misc_feature (18)..(19): 2'-O-methyl
  misc_feature (1)..(19): ribonucleotide unmodified or modified as described for this sequence
  misc_feature (21)..(21): 3'-3 attached terminal deoxyabasic moeity
guguggugagcagaaguggtt

SEQ ID NO: 1687 - DNA, 21 bp, Artificial Sequence
  Synthetic
  misc_feature (1)..(2): 2'-O-methyl
  misc_feature (3)..(3): 2'-deoxy-2'-Fluoro
  misc_feature (4)..(6): 2'-O-methyl
  misc_feature (7)..(9): 2'-deoxy-2'-Fluoro
  misc_feature (10)..(11): 2'-O-methyl
  misc_feature (12)..(12): 2'-deoxy-2'-Fluoro
  misc_feature (13)..(13): 2'-O-methyl
  misc_feature (14)..(16): 2'-deoxy-2'-Fluoro
  misc_feature (17)..(19): 2'-O-methyl
  misc_feature (20)..(20): Phosphorothioate 3'-Internucleotide Linkage
  misc_feature (1)..(19): ribonucleotide unmodified or modified as described for this sequence
aguaggucugauguucgaatt

SEQ ID NO: 1688 - DNA, 21 bp, Artificial Sequence
  Synthetic
  misc_feature (1)..(1): 2'-deoxy-2'-Fluoro
  misc_feature (2)..(3): 2'-O-methyl
  misc_feature (4)..(4): 2'-deoxy-2'-Fluoro
  misc_feature (5)..(5): 2'-O-methyl
  misc_feature (6)..(6): 2'-deoxy-2'-Fluoro
  misc_feature (7)..(8): 2'-O-methyl
  misc_feature (9)..(13): 2'-deoxy-2'-Fluoro
  misc_feature (14)..(17): 2'-O-methyl
  misc_feature (18)..(19): 2'-deoxy-2'-Fluoro
  misc_feature (20)..(20): Phosphorothioate 3'-Internucleotide Linkage
  misc_feature (1)..(19): ribonucleotide unmodified or modified as described for this sequence
ugguauagcccuuggaguutt

SEQ ID NO: 1689 - DNA, 21 bp, Artificial Sequence
  Synthetic
  misc_feature (1)..(1): 2'-O-methyl
  misc_feature (2)..(2): 2'-deoxy-2'-Fluoro
  misc_feature (3)..(5): 2'-O-methyl
  misc_feature (6)..(8): 2'-deoxy-2'-Fluoro
  misc_feature (9)..(10): 2'-O-methyl
  misc_feature (11)..(11): 2'-deoxy-2'-Fluoro
  misc_feature (12)..(12): 2'-O-methyl
  misc_feature (13)..(13): 2'-deoxy-2'-Fluoro
  misc_feature (14)..(15): 2'-O-methyl
  misc_feature (16)..(19): 2'-deoxy-2'-Fluoro
  misc_feature (20)..(20): Phosphorothioate 3'-Internucleotide Linkage
  misc_feature (1)..(19): ribonucleotide unmodified or modified as described for this sequence
auggacuugguauagcccutt

SEQ ID NO: 1690 - DNA, 21 bp, Artificial Sequence
  Synthetic
  misc_feature (1)..(1): 2'-deoxy-2'-Fluoro
  misc_feature (2)..(3): 2'-O-methyl
  misc_feature (4)..(4): 2'-deoxy-2'-Fluoro
  misc_feature (4)..(7): 2'-O-methyl
  misc_feature (8)..(10): 2'-deoxy-2'-Fluoro
  misc_feature (11)..(12): 2'-O-methyl
  misc_feature (13)..(13): 2'-deoxy-2'-Fluoro
  misc_feature (14)..(14): 2'-O-methyl
  misc_feature (15)..(15): 2'-deoxy-2'-Fluoro
  misc_feature (16)..(17): 2'-O-methyl
  misc_feature (18)..(19): 2'-deoxy-2'-Fluoro
  misc_feature (20)..(20): Phosphorothioate 3'-Internucleotide Linkage
  misc_feature (1)..(19): ribonucleotide unmodified or modified as described for this sequence
cgauggacuugguauagcctt

SEQ ID NO: 1691 - DNA, 21 bp, Artificial Sequence
  Synthetic
  misc_feature (1)..(2): 2'-O-methyl
  misc_feature (3)..(4): 2'-deoxy-2'-Fluoro
  misc_feature (5)..(5): 2'-O-methyl
  misc_feature (6)..(6): 2'-deoxy-2'-Fluoro
  misc_feature (7)..(8): 2'-O-methyl
  misc_feature (9)..(9): 2'-deoxy-2'-Fluoro
  misc_feature (10)..(10): 2'-O-methyl
  misc_feature (11)..(12): 2'-deoxy-2'-Fluoro
  misc_feature (13)..(13): 2'-O-methyl
  misc_feature (14)..(17): 2'-deoxy-2'-Fluoro
  misc_feature (18)..(19): 2'-O-methyl
  misc_feature (20)..(20): Phosphorothioate 3'-Internucleotide Linkage
  misc_feature (1)..(19): ribonucleotide unmodified or modified as described for this sequence
ggucauaguacugcuccagtt

SEQ ID NO: 1692 - DNA, 21 bp, Artificial Sequence
  Synthetic
  misc_feature (1)..(5): 2'-deoxy-2'-Fluoro
  misc_feature (6)..(7): 2'-O-methyl
  misc_feature (8)..(8): 2'-deoxy-2'-Fluoro
  misc_feature (9)..(10): 2'-O-methyl
  misc_feature (11)..(13): 2'-deoxy-2'-Fluoro
  misc_feature (14)..(15): 2'-O-methyl
  misc_feature (16)..(16): 2'-deoxy-2'-Fluoro
  misc_feature (17)..(19): 2'-O-methyl
  misc_feature (20)..(20): Phosphorothioate 3'-Internucleotide Linkage
  misc_feature (1)..(19): ribonucleotide unmodified or modified as described for this sequence
uuucuaacagucuggcgggtt

SEQ ID NO: 1693 - DNA, 21 bp, Artificial Sequence
  Synthetic
  misc_feature (1)..(4): 2'-deoxy-2'-Fluoro
  misc_feature (5)..(5): 2'-O-methyl
  misc_feature (6)..(8): 2'-deoxy-2'-Fluoro
  misc_feature (9)..(9): 2'-O-methyl
  misc_feature (10)..(11): 2'-deoxy-2'-Fluoro
  misc_feature (12)..(12): 2'-O-methyl
  misc_feature (13)..(13): 2'-deoxy-2'-Fluoro
  misc_feature (14)..(14): 2'-O-methyl
  misc_feature (15)..(15): 2'-deoxy-2'-Fluoro
  misc_feature (16)..(16): 2'-O-methyl
  misc_feature (17)..(17): 2'-deoxy-2'-Fluoro
  misc_feature (18)..(19): 2'-O-methyl
  misc_feature (20)..(20): Phosphorothioate 3'-Internucleotide Linkage
  misc_feature (1)..(19): ribonucleotide unmodified or modified as described for this sequence
uucugcucaccacacacagtt

SEQ ID NO: 1694 - DNA, 21 bp, Artificial Sequence
  Synthetic
  misc_feature (1)..(2): 2'-deoxy-2'-Fluoro
  misc_feature (3)..(3): 2'-O-methyl
  misc_feature (4)..(8): 2'-deoxy-2'-Fluoro
  misc_feature (9)..(9): 2'-O-methyl
  misc_feature (10)..(12): 2'-deoxy-2'-Fluoro
  misc_feature (13)..(13): 2'-O-methyl
  misc_feature (14)..(15): 2'-deoxy-2'-Fluoro
  misc_feature (16)..(16): 2'-O-methyl
  misc_feature (17)..(17): 2'-deoxy-2'-Fluoro
  misc_feature (18)..(18): 2'-O-methyl
  misc_feature (19)..(19): 2'-deoxy-2'-Fluoro
  misc_feature (20)..(20): Phosphorothioate 3'-Internucleotide Linkage
  misc_feature (1)..(19): ribonucleotide unmodified or modified as described for this sequence
ccacuucugcucaccacactt

SEQ ID NO: 1695 - DNA, 21 bp, Artificial Sequence
  Synthetic
  misc_feature (1)..(1): 5'-3 attached terminal deoxyabasic moeity
  misc_feature (1)..(19): ribonucleotide unmodified or modified as described for this sequence
  misc_feature (21)..(21): 3'-3 attached terminal deoxyabasic moeity
uucgaacaucagaccuacutt

SEQ ID NO: 1696 - DNA, 21 bp, Artificial Sequence
  Synthetic
  misc_feature (1)..(1): 5'-3 attached terminal deoxyabasic moeity
  misc_feature (1)..(19): ribonucleotide unmodified or modified as described for this sequence
  misc_feature (21)..(21): 3'-3 attached terminal deoxyabasic moeity
aacuccaagggcuauaccatt

SEQ ID NO: 1697 - DNA, 21 bp, Artificial Sequence
  Synthetic
  misc_feature (1)..(1): 5'-3 attached terminal deoxyabasic moeity
  misc_feature (1)..(19): ribonucleotide unmodified or modified as described for this sequence
  misc_feature (21)..(21): 3'-3 attached terminal deoxyabasic moeity
agggcuauaccaaguccautt

SEQ ID NO: 1698 - DNA, 21 bp, Artificial Sequence
  Synthetic
  misc_feature (1)..(1): 5'-3 attached terminal deoxyabasic moeity
  misc_feature (1)..(19): ribonucleotide unmodified or modified as described for this sequence
  misc_feature (21)..(21): 3'-3 attached terminal deoxyabasic moeity
ggcuauaccaaguccaucgtt

SEQ ID NO: 1699 - DNA, 21 bp, Artificial Sequence
  Synthetic
  misc_feature (1)..(1): 5'-3 attached terminal deoxyabasic moeity
  misc_feature (1)..(19): ribonucleotide unmodified or modified as described for this sequence
  misc_feature (21)..(21): 3'-3 attached terminal deoxyabasic moeity
cuggagcaguacuaugacctt

SEQ ID NO: 1700 - DNA, 21 bp, Artificial Sequence
  Synthetic
  misc_feature (1)..(1): 5'-3 attached terminal deoxyabasic moeity
  misc_feature (1)..(19): ribonucleotide unmodified or modified as described for this sequence
  misc_feature (21)..(21): 3'-3 attached terminal deoxyabasic moeity
cccgccagacuguuagaaatt

SEQ ID NO: 1701 - DNA, 21 bp, Artificial Sequence
  Synthetic
  misc_feature (1)..(1): 5'-3 attached terminal deoxyabasic moeity
  misc_feature (1)..(19): ribonucleotide unmodified or modified as described for this sequence
  misc_feature (21)..(21): 3'-3 attached terminal deoxyabasic moeity
cuguguguggugagcagaatt

SEQ ID NO: 1702 - DNA, 21 bp, Artificial Sequence
  Synthetic
  misc_feature (1)..(1): 5'-3 attached terminal deoxyabasic moeity
  misc_feature (1)..(19): ribonucleotide unmodified or modified as described for this sequence
  misc_feature (21)..(21): 3'-3 attached terminal deoxyabasic moeity
guguggugagcagaaguggtt

SEQ ID NO: 1703 - DNA, 21 bp, Artificial Sequence
  Synthetic
  misc_feature (20)..(20): Phosphorothioate 3'-Internucleotide Linkage
  misc_feature (1)..(19): ribonucleotide unmodified or modified as described for this sequence
aguaggucugauguucgaatt

SEQ ID NO: 1704 - DNA, 21 bp, Artificial Sequence
  Synthetic
  misc_feature (20)..(20): Phosphorothioate 3'-Internucleotide Linkage
  misc_feature (1)..(19): ribonucleotide unmodified or modified as described for this sequence
ugguauagcccuuggaguutt

SEQ ID NO: 1705 - DNA, 21 bp, Artificial Sequence
  Synthetic
  misc_feature (20)..(20): Phosphorothioate 3'-Internucleotide Linkage
  misc_feature (1)..(19): ribonucleotide unmodified or modified as described for this sequence
auggacuugguauagcccutt

SEQ ID NO: 1706 - DNA, 21 bp, Artificial Sequence
  Synthetic
  misc_feature (20)..(20): Phosphorothioate 3'-Internucleotide Linkage
  misc_feature (1)..(19): ribonucleotide unmodified or modified as described for this sequence
cgauggacuugguauagcctt

SEQ ID NO: 1707 - DNA, 21 bp, Artificial Sequence
  Synthetic
  misc_feature (20)..(20): Phosphorothioate 3'-Internucleotide Linkage
  misc_feature (1)..(19): ribonucleotide unmodified or modified as described for this sequence
ggucauaguacugcuccagtt

SEQ ID NO: 1708 - DNA, 21 bp, Artificial Sequence
  Synthetic
  misc_feature (20)..(20): Phosphorothioate 3'-Internucleotide Linkage
  misc_feature (1)..(19): ribonucleotide unmodified or modified as described for this sequence
uuucuaacagucuggcgggtt

SEQ ID NO: 1709 - DNA, 21 bp, Artificial Sequence
  Synthetic
  misc_feature (20)..(20): Phosphorothioate 3'-Internucleotide Linkage
  misc_feature (1)..(19): ribonucleotide unmodified or modified as described for this sequence
uucugcucaccacacacagtt

SEQ ID NO: 1710 - DNA, 21 bp, Artificial Sequence
  Synthetic
  misc_feature (20)..(20): Phosphorothioate 3'-Internucleotide Linkage
  misc_feature (1)..(19): ribonucleotide unmodified or modified as described for this sequence
ccacuucugcucaccacactt

SEQ ID NO: 1711 - DNA, 21 bp, Artificial Sequence
  Synthetic
  misc_feature (1)..(2): 2'-O-methyl
  misc_feature (3)..(3): 2'-deoxy-2'-Fluoro
  misc_feature (4)..(6): 2'-O-methyl
  misc_feature (7)..(9): 2'-deoxy-2'-Fluoro
  misc_feature (10)..(11): 2'-O-methyl
  misc_feature (12)..(12): 2'-deoxy-2'-Fluoro
  misc_feature (13)..(13): 2'-O-methyl
  misc_feature (14)..(16): 2'-deoxy-2'-Fluoro
  misc_feature (17)..(19): 2'-O-methyl
  misc_feature (1)..(19): ribonucleotide unmodified or modified as described for this sequence
  misc_feature (21)..(21): 3'-3 attached terminal deoxyabasic moeity
aguaggucugauguucgaatt

SEQ ID NO: 1712 - DNA, 21 bp, Artificial Sequence
  Synthetic
  misc_feature (1)..(1): 2'-deoxy-2'-fluoro
  misc_feature (2)..(3): 2'-O-methyl
  misc_feature (4)..(4): 2'-deoxy-2'-fluoro
  misc_feature (5)..(5): 2'-O-methyl
  misc_feature (6)..(6): 2'-deoxy-2'-fluoro
  misc_feature (7)..(8): 2'-O-methyl
  misc_feature (9)..(13): 2'-deoxy-2'-fluoro
  misc_feature (14)..(17): 2'-O-methyl
  misc_feature (18)..(19): 2'-deoxy-2'-fluoro
  misc_feature (1)..(19): ribonucleotide unmodified or modified as described for this sequence
  misc_feature (21)..(21): 3'-3 attached terminal deoxyabasic moeity
ugguauagcccuuggaguutt

SEQ ID NO: 1713 - DNA, 21 bp, Artificial Sequence
  Synthetic
  misc_feature (1)..(1): 2'-O-methyl
  misc_feature (2)..(2): 2'-deoxy-2'-fluoro
  misc_feature (3)..(5): 2'-O-methyl
  misc_feature (6)..(8): 2'-deoxy-2'-fluoro
  misc_feature (9)..(10): 2'-O-methyl
  misc_feature (11)..(11): 2'-deoxy-2'-fluoro
  misc_feature (12)..(12): 2'-O-methyl
  misc_feature (13)..(13): 2'-deoxy-2'-fluoro
  misc_feature (14)..(15): 2'-O-methyl
  misc_feature (16)..(19): 2'-deoxy-2'-fluoro
  misc_feature (1)..(19): ribonucleotide unmodified or modified as described for this sequence
  misc_feature (21)..(21): 3'-3 attached terminal deoxyabasic moeity
auggacuugguauagcccutt

SEQ ID NO: 1714 - DNA, 21 bp, Artificial Sequence
  Synthetic
  misc_feature (1)..(1): 2'-deoxy-2'-fluoro
  misc_feature (2)..(3): 2'-O-methyl
  misc_feature (4)..(4): 2'-deoxy-2'-fluoro
  misc_feature (5)..(7): 2'-O-methyl
  misc_feature (8)..(10): 2'-deoxy-2'-fluoro
  misc_feature (11)..(12): 2'-O-methyl
  misc_feature (13)..(13): 2'-deoxy-2'-fluoro
  misc_feature (14)..(14): 2'-O-methyl
  misc_feature (15)..(15): 2'-deoxy-2'-fluoro
  misc_feature (16)..(17): 2'-O-methyl
  misc_feature (18)..(19): 2'-deoxy-2'-fluoro
  misc_feature (1)..(19): ribonucleotide unmodified or modified as described for this sequence
  misc_feature (21)..(21): 3'-3 attached terminal deoxyabasic moeity
cgauggacuugguauagcctt

SEQ ID NO: 1715 - DNA, 21 bp, Artificial Sequence
  Synthetic
  misc_feature (1)..(2): 2'-O-methyl
  misc_feature (3)..(4): 2'-deoxy-2'-fluoro
  misc_feature (5)..(5): 2'-O-methyl
  misc_feature (6)..(6): 2'-deoxy-2'-fluoro
  misc_feature (7)..(8): 2'-O-methyl
  misc_feature (9)..(9): 2'-deoxy-2'-fluoro
  misc_feature (10)..(10): 2'-O-methyl
  misc_feature (11)..(12): 2'-deoxy-2'-fluoro
  misc_feature (13)..(13): 2'-O-methyl
  misc_feature (14)..(17): 2'-deoxy-2'-fluoro
  misc_feature (18)..(19): 2'-O-methyl
  misc_feature (1)..(19): ribonucleotide unmodified or modified as described for this sequence
  misc_feature (21)..(21): 3'-3 attached terminal deoxyabasic moeity
ggucauaguacugcuccagtt

SEQ ID NO: 1716 - DNA, 21 bp, Artificial Sequence
  Synthetic
  misc_feature (1)..(5): 2'-deoxy-2'-fluoro
  misc_feature (6)..(7): 2'-O-methyl
  misc_feature (8)..(8): 2'-deoxy-2'-fluoro
  misc_feature (9)..(10): 2'-O-methyl
  misc_feature (11)..(13): 2'-deoxy-2'-fluoro
  misc_feature (14)..(15): 2'-O-methyl
  misc_feature (16)..(16): 2'-deoxy-2'-fluoro
  misc_feature (17)..(19): 2'-O-methyl
  misc_feature (1)..(19): ribonucleotide unmodified or modified as described for this sequence
  misc_feature (21)..(21): 3'-3 attached terminal deoxyabasic moeity
uuucuaacagucuggcgggtt

SEQ ID NO: 1717 - DNA, 21 bp, Artificial Sequence
  Synthetic
  misc_feature (1)..(4): 2'-deoxy-2'-fluoro
  misc_feature (5)..(5): 2'-O-methyl
  misc_feature (6)..(8): 2'-deoxy-2'-fluoro
  misc_feature (9)..(9): 2'-O-methyl
  misc_feature (10)..(11): 2'-deoxy-2'-fluoro
  misc_feature (12)..(12): 2'-O-methyl
  misc_feature (13)..(13): 2'-deoxy-2'-fluoro
  misc_feature (14)..(14): 2'-O-methyl
  misc_feature (15)..(15): 2'-deoxy-2'-fluoro
  misc_feature (16)..(16): 2'-O-methyl
  misc_feature (17)..(17): 2'-deoxy-2'-fluoro
  misc_feature (18)..(19): 2'-O-methyl
  misc_feature (1)..(19): ribonucleotide unmodified or modified as described for this sequence
  misc_feature (21)..(21): 3'-3 attached terminal deoxyabasic moeity
uucugcucaccacacacagtt

SEQ ID NO: 1718 - DNA, 21 bp, Artificial Sequence
  Synthetic
  misc_feature (1)..(2): 2'-deoxy-2'-fluoro
  misc_feature (3)..(3): 2'-O-methyl
  misc_feature (4)..(8): 2'-deoxy-2'-fluoro
  misc_feature (9)..(9): 2'-O-methyl
  misc_feature (10)..(12): 2'-deoxy-2'-fluoro
  misc_feature (13)..(13): 2'-O-methyl
  misc_feature (14)..(15): 2'-deoxy-2'-fluoro
  misc_feature (16)..(16): 2'-O-methyl
  misc_feature (17)..(17): 2'-deoxy-2'-fluoro
  misc_feature (18)..(18): 2'-O-methyl
  misc_feature (19)..(19): 2'-deoxy-2'-fluoro
  misc_feature (1)..(19): ribonucleotide unmodified or modified as described for this sequence
  misc_feature (21)..(21): 3'-3 attached terminal deoxyabasic moeity
ccacuucugcucaccacactt

SEQ ID NO: 1719 - DNA, 21 bp, Artificial Sequence
  Synthetic
  misc_feature (1)..(19): ribonucleotide unmodified or modified as described for this sequence
  misc_feature (21)..(21): 3'-3 attached terminal deoxyabasic moeity
aguaggucugauguucgaatt

SEQ ID NO: 1720 - DNA, 21 bp, Artificial Sequence
  Synthetic
  misc_feature (1)..(19): ribonucleotide unmodified or modified as described for this sequence
  misc_feature (21)..(21): 3'-3 attached terminal deoxyabasic moeity
ugguauagcccuuggaguutt

SEQ ID NO: 1721 - DNA, 21 bp, Artificial Sequence
  Synthetic
  misc_feature (1)..(19): ribonucleotide unmodified or modified as described for this sequence
  misc_feature (21)..(21): 3'-3 attached terminal deoxyabasic moeity
auggacuugguauagcccutt

SEQ ID NO: 1722 - DNA, 21 bp, Artificial Sequence
  Synthetic
  misc_feature (1)..(19): ribonucleotide unmodified or modified as described for this sequence
  misc_feature (21)..(21): 3'-3 attached terminal deoxyabasic moeity
cgauggacuugguauagcctt

SEQ ID NO: 1723 - DNA, 21 bp, Artificial Sequence
  Synthetic
  misc_feature (1)..(19): ribonucleotide unmodified or modified as described for this sequence
  misc_feature (21)..(21): 3'-3 attached terminal deoxyabasic moeity
ggucauaguacugcuccagtt

SEQ ID NO: 1724 - DNA, 21 bp, Artificial Sequence
  Synthetic
  misc_feature (1)..(19): ribonucleotide unmodified or modified as described for this sequence
  misc_feature (21)..(21): 3'-3 attached terminal deoxyabasic moeity
uuucuaacagucuggcgggtt

SEQ ID NO: 1725 - DNA, 21 bp, Artificial Sequence
  Synthetic
  misc_feature (1)..(19): ribonucleotide unmodified or modified as described for this sequence
  misc_feature (21)..(21): 3'-3 attached terminal deoxyabasic moeity
uucugcucaccacacacagtt

SEQ ID NO: 1726 - DNA, 21 bp, Artificial Sequence
  Synthetic
  misc_feature (1)..(19): ribonucleotide unmodified or modified as described for this sequence
  misc_feature (21)..(21): 3'-3 attached terminal deoxyabasic moeity
ccacuucugcucaccacactt

SEQ ID NO: 1727 - DNA, 21 bp, Artificial Sequence
  Synthetic
  misc_feature (1)..(19): ribonucleotide unmodified or modified as described for this sequence
agcaagcgugacaacaauutt

SEQ ID NO: 1728 - DNA, 21 bp, Artificial Sequence
  Synthetic
  misc_feature (1)..(19): ribonucleotide unmodified or modified as described for this sequence
cagcuuggaacaccauguctt

SEQ ID NO: 1729 - DNA, 21 bp, Artificial Sequence
  Synthetic
  misc_feature (1)..(19): ribonucleotide unmodified or modified as described for this sequence
uuucccagcugacucagaatt

SEQ ID NO: 1730 - DNA, 21 bp, Artificial Sequence
  Synthetic
  misc_feature (1)..(19): ribonucleotide unmodified or modified as described for this sequence
uucccagcugacucagaactt

SEQ ID NO: 1731 - DNA, 21 bp, Artificial Sequence
  Synthetic
  misc_feature (1)..(19): ribonucleotide unmodified or modified as described for this sequence
aacuuaaagccagucaggctt

SEQ ID NO: 1732 - DNA, 21 bp, Artificial Sequence
  Synthetic
  misc_feature (1)..(19): ribonucleotide unmodified or modified as described for this sequence
gcaagggauuuguuauccatt

SEQ ID NO: 1733 - DNA, 21 bp, Artificial Sequence
  Synthetic
  misc_feature (1)..(19): ribonucleotide unmodified or modified as described for this sequence
augucaacagauccgacuutt

SEQ ID NO: 1734 - DNA, 21 bp, Artificial Sequence
  Synthetic
  misc_feature (1)..(19): ribonucleotide unmodified or modified as described for this sequence
uuggccucugauacagacatt

SEQ ID NO: 1735 - DNA, 21 bp, Artificial Sequence
  Synthetic
  misc_feature (1)..(19): ribonucleotide unmodified or modified as described for this sequence
aauuguugucacgcuugcutt

SEQ ID NO: 1736 - DNA, 21 bp, Artificial Sequence
  Synthetic
  misc_feature (1)..(19): ribonucleotide unmodified or modified as described for this sequence
gacaugguguuccaagcugtt

SEQ ID NO: 1737 - DNA, 21 bp, Artificial Sequence
  Synthetic
  misc_feature (1)..(19): ribonucleotide unmodified or modified as described for this sequence
uucugagucagcugggaaatt

SEQ ID NO: 1738 - DNA, 21 bp, Artificial Sequence
  Synthetic
  misc_feature (1)..(19): ribonucleotide unmodified or modified as described for this sequence
guucugagucagcugggaatt

SEQ ID NO: 1739 - DNA, 21 bp, Artificial Sequence
  Synthetic
  misc_feature (1)..(19): ribonucleotide unmodified or modified as described for this sequence
gccugacuggcuuuaaguutt

SEQ ID NO: 1740 - DNA, 21 bp, Artificial Sequence
  Synthetic
  misc_feature (1)..(19): ribonucleotide unmodified or modified as described for this sequence
uggauaacaaaucccuugctt

SEQ ID NO: 1741 - DNA, 21 bp, Artificial Sequence
  Synthetic
  misc_feature (1)..(19): ribonucleotide unmodified or modified as described for this sequence
aagucggaucuguugacautt

SEQ ID NO: 1742 - DNA, 21 bp, Artificial Sequence
  Synthetic
  misc_feature (1)..(19): ribonucleotide unmodified or modified as described for this sequence
ugucuguaucagaggccaatt

SEQ ID NO: 1743 - DNA, 21 bp, Artificial Sequence
  Synthetic
  misc_feature (1)..(1): 5'-3 attached terminal deoxyabasic moeity
  misc_feature (3)..(3): 2'-deoxy-2'-fluoro
  misc_feature (7)..(7): 2'-deoxy-2'-fluoro
  misc_feature (9)..(9): 2'-deoxy-2'-fluoro
  misc_feature (12)..(12): 2'-deoxy-2'-fluoro
  misc_feature (15)..(15): 2'-deoxy-2'-fluoro
  misc_feature (18)..(19): 2'-deoxy-2'-fluoro
  misc_feature (1)..(19): ribonucleotide unmodified or modified as described for this sequence
  misc_feature (21)..(21): 3'-3 attached terminal deoxyabasic moeity
agcaagcgugacaacaauutt

SEQ ID NO: 1744 - DNA, 21 bp, Artificial Sequence
  Synthetic
  misc_feature (1)..(1): 2'-deoxy-2'-fluoro
  misc_feature (1)..(1): 5'-3 attached terminal deoxyabasic moeity
  misc_feature (4)..(6): 2'-deoxy-2'-fluoro
  misc_feature (11)..(11): 2'-deoxy-2'-fluoro
  misc_feature (13)..(14): 2'-deoxy-2'-fluoro
  misc_feature (16)..(16): 2'-deoxy-2'-fluoro
  misc_feature (18)..(19): 2'-deoxy-2'-fluoro
  misc_feature (1)..(19): ribonucleotide unmodified or modified as described for this sequence
  misc_feature (21)..(21): 3'-3 attached terminal deoxyabasic moeity
cagcuuggaacaccauguctt

SEQ ID NO: 1745 - DNA, 21 bp, Artificial Sequence
  Synthetic
  misc_feature (1)..(1): 5'-3 attached terminal deoxyabasic moeity
  misc_feature (1)..(6): 2'-deoxy-2'-fluoro
  misc_feature (9)..(10): 2'-deoxy-2'-fluoro
  misc_feature (13)..(15): 2'-deoxy-2'-fluoro
  misc_feature (1)..(19): ribonucleotide unmodified or modified as described for this sequence
  misc_feature (21)..(21): 3'-3 attached terminal deoxyabasic moeity
uuucccagcugacucagaatt

SEQ ID NO: 1746 - DNA, 21 bp, Artificial Sequence
  Synthetic
  misc_feature (1)..(5): 2'-deoxy-2'-fluoro
  misc_feature (1)..(1): 5'-3 attached terminal deoxyabasic moeity
  misc_feature (8)..(9): 2'-deoxy-2'-fluoro
  misc_feature (12)..(14): 2'-deoxy-2'-fluoro
  misc_feature (19)..(19): 2'-deoxy-2'-fluoro
  misc_feature (1)..(19): ribonucleotide unmodified or modified as described for this sequence
  misc_feature (21)..(21): 3'-3 attached terminal deoxyabasic moeity
uucccagcugacucagaactt

SEQ ID NO: 1747 - DNA, 21 bp, Artificial Sequence
  Synthetic
  misc_feature (1)..(1): 5'-3 attached terminal deoxyabasic moeity
  misc_feature (3)..(5): 2'-deoxy-2'-fluoro
  misc_feature (10)..(11): 2'-deoxy-2'-fluoro
  misc_feature (14)..(15): 2'-deoxy-2'-fluoro
  misc_feature (19)..(19): 2'-deoxy-2'-fluoro
  misc_feature (1)..(19): ribonucleotide unmodified or modified as described for this sequence
  misc_feature (21)..(21): 3'-3 attached terminal deoxyabasic moeity
aacuuaaagccagucaggctt

SEQ ID NO: 1748 - DNA, 21 bp, Artificial Sequence
  Synthetic
  misc_feature (1)..(1): 5'-3 attached terminal deoxyabasic moeity
  misc_feature (2)..(2): 2'-deoxy-2'-fluoro
  misc_feature (9)..(11): 2'-deoxy-2'-fluoro
  misc_feature (13)..(14): 2'-deoxy-2'-fluoro
  misc_feature (16)..(18): 2'-deoxy-2'-fluoro
  misc_feature (1)..(19): ribonucleotide unmodified or modified as described for this sequence
  misc_feature (21)..(21): 3'-3 attached terminal deoxyabasic moeity
gcaagggauuuguuauccatt

SEQ ID NO: 1749 - DNA, 21 bp, Artificial Sequence
  Synthetic
  misc_feature (1)..(1): 5'-3 attached terminal deoxyabasic moeity
  misc_feature (2)..(2): 2'-deoxy-2'-fluoro
  misc_feature (4)..(5): 2'-deoxy-2'-fluoro
  misc_feature (8)..(8): 2'-deoxy-2'-fluoro
  misc_feature (12)..(14): 2'-deoxy-2'-fluoro
  misc_feature (17)..(19): 2'-deoxy-2'-fluoro
  misc_feature (1)..(19): ribonucleotide unmodified or modified as described for this sequence
  misc_feature (21)..(21): 3'-3 attached terminal deoxyabasic moeity
augucaacagauccgacuutt

SEQ ID NO: 1750 - DNA, 21 bp, Artificial Sequence
  Synthetic
  misc_feature (1)..(2): 2'-deoxy-2'-fluoro
  misc_feature (1)..(1): 5'-3 attached terminal deoxyabasic moeity
  misc_feature (5)..(9): 2'-deoxy-2'-fluoro
  misc_feature (12)..(12): 2'-deoxy-2'-fluoro
  misc_feature (14)..(14): 2'-deoxy-2'-fluoro
  misc_feature (18)..(18): 2'-deoxy-2'-fluoro
  misc_feature (1)..(19): ribonucleotide unmodified or modified as described for this sequence
  misc_feature (21)..(21): 3'-3 attached terminal deoxyabasic moeity
uuggccucugauacagacatt

SEQ ID NO: 1751 - DNA, 21 bp, Artificial Sequence
  Synthetic
  misc_feature (3)..(4): 2'-deoxy-2'-fluoro
  misc_feature (6)..(7): 2'-deoxy-2'-fluoro
  misc_feature (9)..(10): 2'-deoxy-2'-fluoro
  misc_feature (12)..(12): 2'-deoxy-2'-fluoro
  misc_feature (14)..(16): 2'-deoxy-2'-fluoro
  misc_feature (18)..(19): 2'-deoxy-2'-fluoro
  misc_feature (20)..(20): Phosphorothioate 3'-Internucleotide Linkage
  misc_feature (1)..(19): ribonucleotide unmodified or modified as described for this sequence
aauuguugucacgcuugcutt

SEQ ID NO: 1752 - DNA, 21 bp, Artificial Sequence
  Synthetic
  misc_feature (3)..(3): 2'-deoxy-2'-fluoro
  misc_feature (5)..(5): 2'-deoxy-2'-fluoro
  misc_feature (8)..(8): 2'-deoxy-2'-fluoro
  misc_feature (10)..(13): 2'-deoxy-2'-fluoro
  misc_feature (18)..(18): 2'-deoxy-2'-fluoro
  misc_feature (20)..(20): Phosphorothioate 3'-Internucleotide Linkage
  misc_feature (1)..(19): ribonucleotide unmodified or modified as described for this sequence
gacaugguguuccaagcugtt

SEQ ID NO: 1753 - DNA, 21 bp, Artificial Sequence
  Synthetic
  misc_feature (1)..(4): 2'-deoxy-2'-fluoro
  misc_feature (8)..(9): 2'-deoxy-2'-fluoro
  misc_feature (12)..(13): 2'-deoxy-2'-fluoro
  misc_feature (20)..(20): Phosphorothioate 3'-Internucleotide Linkage
  misc_feature (1)..(19): ribonucleotide unmodified or modified as described for this sequence
uucugagucagcugggaaatt

SEQ ID NO: 1754 - DNA, 21 bp, Artificial Sequence
  Synthetic
  misc_feature (2)..(5): 2'-deoxy-2'-fluoro
  misc_feature (9)..(10): 2'-deoxy-2'-fluoro
  misc_feature (13)..(14): 2'-deoxy-2'-fluoro
  misc_feature (20)..(20): Phosphorothioate 3'-Internucleotide Linkage
  misc_feature (1)..(19): ribonucleotide unmodified or modified as described for this sequence
guucugagucagcugggaatt

SEQ ID NO: 1755 - DNA, 21 bp, Artificial Sequence
  Synthetic
  misc_feature (2)..(4): 2'-deoxy-2'-fluoro
  misc_feature (7)..(8): 2'-deoxy-2'-fluoro
  misc_feature (11)..(14): 2'-deoxy-2'-fluoro
  misc_feature (18)..(19): 2'-deoxy-2'-fluoro
  misc_feature (20)..(20): Phosphorothioate 3'-Internucleotide Linkage
  misc_feature (1)..(19): ribonucleotide unmodified or modified as described for this sequence
gccugacuggcuuuaaguutt

SEQ ID NO: 1756 - DNA, 21 bp, Artificial Sequence
  Synthetic
  misc_feature (1)..(1): 2'-deoxy-2'-fluoro
  misc_feature (5)..(5): 2'-deoxy-2'-fluoro
  misc_feature (8)..(8): 2'-deoxy-2'-fluoro
  misc_feature (12)..(17): 2'-deoxy-2'-fluoro
  misc_feature (19)..(19): 2'-deoxy-2'-fluoro
  misc_feature (20)..(20): Phosphorothioate 3'-Internucleotide Linkage
  misc_feature (1)..(19): ribonucleotide unmodified or modified as described for this sequence
uggauaacaaaucccuugctt

SEQ ID NO: 1757 - DNA, 21 bp, Artificial Sequence
  Synthetic
  misc_feature (4)..(5): 2'-deoxy-2'-fluoro
  misc_feature (9)..(11): 2'-deoxy-2'-fluoro
  misc_feature (13)..(14): 2'-deoxy-2'-fluoro
  misc_feature (17)..(17): 2'-deoxy-2'-fluoro
  misc_feature (19)..(19): 2'-deoxy-2'-fluoro
  misc_feature (20)..(20): Phosphorothioate 3'-Internucleotide Linkage
  misc_feature (1)..(19): ribonucleotide unmodified or modified as described for this sequence
aagucggaucuguugacautt

SEQ ID NO: 1758 - DNA, 21 bp, Artificial Sequence
  Synthetic
  misc_feature (1)..(1): 2'-deoxy-2'-fluoro
  misc_feature (3)..(5): 2'-deoxy-2'-fluoro
  misc_feature (7)..(7): 2'-deoxy-2'-fluoro
  misc_feature (9)..(10): 2'-deoxy-2'-fluoro
  misc_feature (16)..(17): 2'-deoxy-2'-fluoro
  misc_feature (20)..(20): Phosphorothioate 3'-Internucleotide Linkage
  misc_feature (1)..(19): ribonucleotide unmodified or modified as described for this sequence
ugucuguaucagaggccaatt

SEQ ID NO: 1759 - DNA, 21 bp, Artificial Sequence
  Synthetic
  misc_feature (1)..(2): deoxy
  misc_feature (1)..(1): 5'-3 attached terminal deoxyabasic moeity
  misc_feature (3)..(3): 2'-deoxy-2'-fluoro
  misc_feature (4)..(6): deoxy
  misc_feature (7)..(7): 2'-deoxy-2'-fluoro
  misc_feature (8)..(8): deoxy
  misc_feature (9)..(9): 2'-deoxy-2'-fluoro
  misc_feature (10)..(11): deoxy
  misc_feature (12)..(12): 2'-deoxy-2'-fluoro
  misc_feature (13)..(14): deoxy
  misc_feature (15)..(15): 2'-deoxy-2'-fluoro
  misc_feature (16)..(17): deoxy
  misc_feature (18)..(19): 2'-deoxy-2'-fluoro
  misc_feature (1)..(19): ribonucleotide unmodified or modified as described for this sequence
  misc_feature (21)..(21): 3'-3 attached terminal deoxyabasic moeity
agcaagcgugacaacaauutt

SEQ ID NO: 1760 - DNA, 21 bp, Artificial Sequence
  Synthetic
  misc_feature (1)..(1): 5'-3 attached terminal deoxyabasic moeity
  misc_feature (1)..(1): 2'-deoxy-2'-fluoro
  misc_feature (2)..(3): deoxy
  misc_feature (4)..(6): 2'-deoxy-2'-fluoro
  misc_feature (7)..(10): deoxy
  misc_feature (11)..(11): 2'-deoxy-2'-fluoro
  misc_feature (12)..(12): deoxy
  misc_feature (13)..(14): 2'-deoxy-2'-fluoro
  misc_feature (15)..(15): deoxy
  misc_feature (16)..(16): 2'-deoxy-2'-fluoro
  misc_feature (17)..(17): deoxy
  misc_feature (18)..(19): 2'-deoxy-2'-fluoro
  misc_feature (1)..(19): ribonucleotide unmodified or modified as described for this sequence
  misc_feature (21)..(21): 3'-3 attached terminal deoxyabasic moeity
cagcuuggaacaccauguctt

SEQ ID NO: 1761 - DNA, 21 bp, Artificial Sequence
  Synthetic
  misc_feature (1)..(6): 2'-deoxy-2'-fluoro
  misc_feature (1)..(1): 5'-3 attached terminal deoxyabasic moeity
  misc_feature (7)..(8): deoxy
  misc_feature (9)..(10): 2'-deoxy-2'-fluoro
  misc_feature (11)..(12): deoxy
  misc_feature (13)..(15): 2'-deoxy-2'-fluoro
  misc_feature (16)..(19): deoxy
  misc_feature (1)..(19): ribonucleotide unmodified or modified as described for this sequence
  misc_feature (21)..(21): 3'-3 attached terminal deoxyabasic moeity
uuucccagcugacucagaatt

SEQ ID NO: 1762 - DNA, 21 bp, Artificial Sequence
  Synthetic
  misc_feature (1)..(1): 5'-3 attached terminal deoxyabasic moeity
  misc_feature (1)..(5): 2'-deoxy-2'-fluoro
  misc_feature (6)..(7): deoxy
  misc_feature (8)..(9): 2'-deoxy-2'-fluoro
  misc_feature (10)..(11): deoxy
  misc_feature (12)..(14): 2'-deoxy-2'-fluoro
  misc_feature (15)..(18): deoxy
  misc_feature (19)..(19): 2'-deoxy-2'-fluoro
  misc_feature (1)..(19): ribonucleotide unmodified or modified as described for this sequence
  misc_feature (21)..(21): 3'-3 attached terminal deoxyabasic moeity
uucccagcugacucagaactt

SEQ ID NO: 1763 - DNA, 21 bp, Artificial Sequence
  Synthetic
  misc_feature (1)..(2): deoxy
  misc_feature (1)..(1): 5'-3 attached terminal deoxyabasic moeity
  misc_feature (3)..(5): 2'-deoxy-2'-fluoro
  misc_feature (6)..(9): deoxy
  misc_feature (10)..(11): 2'-deoxy-2'-fluoro
  misc_feature (12)..(13): deoxy
  misc_feature (14)..(15): 2'-deoxy-2'-fluoro
  misc_feature (16)..(18): deoxy
  misc_feature (19)..(19): 2'-deoxy-2'-fluoro
  misc_feature (1)..(19): ribonucleotide unmodified or modified as described for this sequence
  misc_feature (21)..(21): 3'-3 attached terminal deoxyabasic moeity
aacuuaaagccagucaggctt

SEQ ID NO: 1764 - DNA, 21 bp, Artificial Sequence
  Synthetic
  misc_feature (1)..(1): 5'-3 attached terminal deoxyabasic moeity
  misc_feature (1)..(1): deoxy
  misc_feature (2)..(2): 2'-deoxy-2'-fluoro
  misc_feature (3)..(8): deoxy
  misc_feature (9)..(11): 2'-deoxy-2'-fluoro
  misc_feature (12)..(12): deoxy
  misc_feature (13)..(14): 2'-deoxy-2'-fluoro
  misc_feature (15)..(15): deoxy
  misc_feature (16)..(18): 2'-deoxy-2'-fluoro
  misc_feature (19)..(19): deoxy
  misc_feature (1)..(19): ribonucleotide unmodified or modified as described for this sequence
  misc_feature (21)..(21): 3'-3 attached terminal deoxyabasic moeity
gcaagggauuuguuauccatt

SEQ ID NO: 1765 - DNA, 21 bp, Artificial Sequence
  Synthetic
  misc_feature (1)..(1): deoxy
  misc_feature (1)..(1): 5'-3 attached terminal deoxyabasic moeity
  misc_feature (2)..(2): 2'-deoxy-2'-fluoro
  misc_feature (3)..(3): deoxy
  misc_feature (4)..(5): 2'-deoxy-2'-fluoro
  misc_feature (6)..(7): deoxy
  misc_feature (8)..(8): 2'-deoxy-2'-fluoro
  misc_feature (9)..(11): deoxy
  misc_feature (12)..(14): 2'-deoxy-2'-fluoro
  misc_feature (15)..(16): deoxy
  misc_feature (17)..(19): 2'-deoxy-2'-fluoro
  misc_feature (1)..(19): ribonucleotide unmodified or modified as described for this sequence
  misc_feature (21)..(21): 3'-3 attached terminal deoxyabasic moeity
augucaacagauccgacuutt

SEQ ID NO: 1766 - DNA, 21 bp, Artificial Sequence
  Synthetic
  misc_feature (1)..(1): 5'-3 attached terminal deoxyabasic moeity
  misc_feature (1)..(2): 2'-deoxy-2'-fluoro
  misc_feature (3)..(4): deoxy
  misc_feature (5)..(9): 2'-deoxy-2'-fluoro
  misc_feature (10)..(11): deoxy
  misc_feature (12)..(12): 2'-deoxy-2'-fluoro
  misc_feature (13)..(13): deoxy
  misc_feature (14)..(14): 2'-deoxy-2'-fluoro
  misc_feature (15)..(17): deoxy
  misc_feature (18)..(18): 2'-deoxy-2'-fluoro
  misc_feature (19)..(19): deoxy
  misc_feature (1)..(19): ribonucleotide unmodified or modified as described for this sequence
  misc_feature (21)..(21): 3'-3 attached terminal deoxyabasic moeity
uuggccucugauacagacatt

SEQ ID NO: 1767 - DNA, 21 bp, Artificial Sequence
  Synthetic
  misc_feature (1)..(2): deoxy
  misc_feature (3)..(4): 2'-deoxy-2'-fluoro
  misc_feature (5)..(5): deoxy
  misc_feature (6)..(7): 2'-deoxy-2'-fluoro
  misc_feature (8)..(8): deoxy
  misc_feature (9)..(10): 2'-deoxy-2'-fluoro
  misc_feature (11)..(11): deoxy
  misc_feature (12)..(12): 2'-deoxy-2'-fluoro
  misc_feature (13)..(13): deoxy
  misc_feature (14)..(16): 2'-deoxy-2'-fluoro
  misc_feature (17)..(17): deoxy
  misc_feature (18)..(19): 2'-deoxy-2'-fluoro
  misc_feature (20)..(20): Phosphorothioate 3'-Internucleotide Linkage
  misc_feature (1)..(19): ribonucleotide unmodified or modified as described for this sequence
aauuguugucacgcuugcutt

SEQ ID NO: 1768 - DNA, 21 bp, Artificial Sequence
  Synthetic
  misc_feature (1)..(2): deoxy
  misc_feature (3)..(3): 2'-deoxy-2'-fluoro
  misc_feature (4)..(4): deoxy
  misc_feature (5)..(5): 2'-deoxy-2'-fluoro
  misc_feature (6)..(7): deoxy
  misc_feature (8)..(8): 2'-deoxy-2'-fluoro
  misc_feature (9)..(9): deoxy
  misc_feature (10)..(13): 2'-deoxy-2'-fluoro
  misc_feature (14)..(16): deoxy
  misc_feature (17)..(18): 2'-deoxy-2'-fluoro
  misc_feature (19)..(19): deoxy
  misc_feature (20)..(20): Phosphorothioate 3'-Internucleotide Linkage
  misc_feature (1)..(19): ribonucleotide unmodified or modified as described for this sequence
gacaugguguuccaagcugtt

SEQ ID NO: 1769 - DNA, 21 bp, Artificial Sequence
  Synthetic
  misc_feature (1)..(4): 2'-deoxy-2'-fluoro
  misc_feature (5)..(7): deoxy
  misc_feature (8)..(9): 2'-deoxy-2'-fluoro
  misc_feature (10)..(11): deoxy
  misc_feature (12)..(13): 2'-deoxy-2'-fluoro
  misc_feature (14)..(19): deoxy
  misc_feature (20)..(20): Phosphorothioate 3'-Internucleotide Linkage
  misc_feature (1)..(19): ribonucleotide unmodified or modified as described for this sequence
uucugagucagcugggaaatt

SEQ ID NO: 1770 - DNA, 21 bp, Artificial Sequence
  Synthetic
  misc_feature (1)..(1): deoxy
  misc_feature (2)..(5): 2'-deoxy-2'-fluoro
  misc_feature (6)..(8): deoxy
  misc_feature (9)..(10): 2'-deoxy-2'-fluoro
  misc_feature (11)..(12): deoxy
  misc_feature (13)..(14): 2'-deoxy-2'-fluoro
  misc_feature (15)..(19): deoxy
  misc_feature (20)..(20): Phosphorothioate 3'-Internucleotide Linkage
  misc_feature (1)..(19): ribonucleotide unmodified or modified as described for this sequence
guucugagucagcugggaatt

SEQ ID NO: 1771 - DNA, 21 bp, Artificial Sequence
  Synthetic
  misc_feature (1)..(1): deoxy
  misc_feature (2)..(4): 2'-deoxy-2'-fluoro
  misc_feature (5)..(6): deoxy
  misc_feature (7)..(8): 2'-deoxy-2'-fluoro
  misc_feature (9)..(10): deoxy
  misc_feature (11)..(14): 2'-deoxy-2'-fluoro
  misc_feature (15)..(17): deoxy
  misc_feature (18)..(19): 2'-deoxy-2'-fluoro
  misc_feature (20)..(20): Phosphorothioate 3'-Internucleotide Linkage
  misc_feature (1)..(19): ribonucleotide unmodified or modified as described for this sequence
gccugacuggcuuuaaguutt

SEQ ID NO: 1772 - DNA, 21 bp, Artificial Sequence
  Synthetic
  misc_feature (1)..(1): 2'-deoxy-2'-fluoro
  misc_feature (2)..(4): deoxy
  misc_feature (5)..(5): 2'-deoxy-2'-fluoro
  misc_feature (6)..(7): deoxy
  misc_feature (8)..(8): 2'-deoxy-2'-fluoro
  misc_feature (9)..(11): deoxy
  misc_feature (12)..(17): 2'-deoxy-2'-fluoro
  misc_feature (18)..(18): deoxy
  misc_feature (19)..(19): 2'-deoxy-2'-fluoro
  misc_feature (20)..(20): Phosphorothioate 3'-Internucleotide Linkage
  misc_feature (1)..(19): ribonucleotide unmodified or modified as described for this sequence
uggauaacaaaucccuugctt

SEQ ID NO: 1773 - DNA, 21 bp, Artificial Sequence
  Synthetic
  misc_feature (1)..(3): deoxy
  misc_feature (4)..(5): 2'-deoxy-2'-fluoro
  misc_feature (6)..(8): deoxy
  misc_feature (9)..(11): 2'-deoxy-2'-fluoro
  misc_feature (12)..(12): deoxy
  misc_feature (13)..(14): 2'-deoxy-2'-fluoro
  misc_feature (15)..(16): deoxy
  misc_feature (17)..(17): 2'-deoxy-2'-fluoro
  misc_feature (18)..(18): deoxy
  misc_feature (19)..(19): 2'-deoxy-2'-fluoro
  misc_feature (20)..(20): Phosphorothioate 3'-Internucleotide Linkage
  misc_feature (1)..(19): ribonucleotide unmodified or modified as described for this sequence
aagucggaucuguugacautt

SEQ ID NO: 1774 - DNA, 21 bp, Artificial Sequence
  Synthetic
  misc_feature (1)..(1): 2'-deoxy-2'-fluoro
  misc_feature (2)..(2): deoxy
  misc_feature (3)..(5): 2'-deoxy-2'-fluoro
  misc_feature (6)..(6): deoxy
  misc_feature (7)..(7): 2'-deoxy-2'-fluoro
  misc_feature (8)..(8): deoxy
  misc_feature (9)..(10): 2'-deoxy-2'-fluoro
  misc_feature (11)..(15): deoxy
  misc_feature (16)..(17): 2'-deoxy-2'-fluoro
  misc_feature (18)..(19): deoxy
  misc_feature (20)..(20): Phosphorothioate 3'-Internucleotide Linkage
  misc_feature (1)..(19): ribonucleotide unmodified or modified as described for this sequence
ugucuguaucagaggccaatt

SEQ ID NO: 1775 - DNA, 21 bp, Artificial Sequence
  Synthetic
  misc_feature (1)..(2): 2'-O-methyl
  misc_feature (1)..(1): 5'-3 attached terminal deoxyabasic moeity
  misc_feature (3)..(3): 2'-deoxy-2'-fluoro
  misc_feature (4)..(6): 2'-O-methyl
  misc_feature (7)..(7): 2'-deoxy-2'-fluoro
  misc_feature (8)..(8): 2'-O-methyl
  misc_feature (9)..(9): 2'-deoxy-2'-fluoro
  misc_feature (10)..(11): 2'-O-methyl
  misc_feature (12)..(12): 2'-deoxy-2'-fluoro
  misc_feature (13)..(14): 2'-O-methyl
  misc_feature (15)..(15): 2'-deoxy-2'-fluoro
  misc_feature (16)..(17): 2'-O-methyl
  misc_feature (18)..(19): 2'-deoxy-2'-fluoro
  misc_feature (1)..(19): ribonucleotide unmodified or modified as described for this sequence
  misc_feature (21)..(21): 3'-3 attached terminal deoxyabasic moeity
agcaagcgugacaacaauutt

SEQ ID NO: 1776 - DNA, 21 bp, Artificial Sequence
  Synthetic
  misc_feature (1)..(1): 5'-3 attached terminal deoxyabasic moeity
  misc_feature (1)..(1): 2'-deoxy-2'-fluoro
  misc_feature (2)..(3): 2'-O-methyl
  misc_feature (4)..(6): 2'-deoxy-2'-fluoro
  misc_feature (7)..(10): 2'-O-methyl
  misc_feature (11)..(11): 2'-deoxy-2'-fluoro
  misc_feature (12)..(12): 2'-O-methyl
  misc_feature (13)..(14): 2'-deoxy-2'-fluoro
  misc_feature (15)..(15): 2'-O-methyl
  misc_feature (16)..(16): 2'-deoxy-2'-fluoro
  misc_feature (17)..(17): 2'-O-methyl
  misc_feature (18)..(19): 2'-deoxy-2'-fluoro
  misc_feature (1)..(19): ribonucleotide unmodified or modified as described for this sequence
  misc_feature (21)..(21): 3'-3 attached terminal deoxyabasic moeity
cagcuuggaacaccauguctt

SEQ ID NO: 1777 - DNA, 21 bp, Artificial Sequence
  Synthetic
  misc_feature (1)..(6): 2'-deoxy-2'-fluoro
  misc_feature (1)..(1): 5'-3 attached terminal deoxyabasic moeity
  misc_feature (7)..(8): 2'-O-methyl
  misc_feature (9)..(10): 2'-deoxy-2'-fluoro
  misc_feature (11)..(12): 2'-O-methyl
  misc_feature (13)..(15): 2'-deoxy-2'-fluoro
  misc_feature (16)..(19): 2'-O-methyl
  misc_feature (1)..(19): ribonucleotide unmodified or modified as described for this sequence
  misc_feature (21)..(21): 3'-3 attached terminal deoxyabasic moeity
uuucccagcugacucagaatt

SEQ ID NO: 1778 - DNA, 21 bp, Artificial Sequence
  Synthetic
  misc_feature (1)..(1): 5'-3 attached terminal deoxyabasic moeity
  misc_feature (1)..(5): 2'-deoxy-2'-fluoro
  misc_feature (6)..(7): 2'-O-methyl
  misc_feature (8)..(9): 2'-deoxy-2'-fluoro
  misc_feature (10)..(11): 2'-O-methyl
  misc_feature (12)..(14): 2'-deoxy-2'-fluoro
  misc_feature (15)..(18): 2'-O-methyl
  misc_feature (19)..(19): 2'-deoxy-2'-fluoro
  misc_feature (1)..(19): ribonucleotide unmodified or modified as described for this sequence
  misc_feature (21)..(21): 3'-3 attached terminal deoxyabasic moeity
uucccagcugacucagaactt

SEQ ID NO: 1779 - DNA, 21 bp, Artificial Sequence
  Synthetic
  misc_feature (1)..(2): 2'-O-methyl
  misc_feature (1)..(1): 5'-3 attached terminal deoxyabasic moeity
  misc_feature (3)..(5): 2'-deoxy-2'-fluoro
  misc_feature (6)..(9): 2'-O-methyl
  misc_feature (10)..(11): 2'-deoxy-2'-fluoro
  misc_feature (12)..(13): 2'-O-methyl
  misc_feature (14)..(15): 2'-deoxy-2'-fluoro
  misc_feature (16)..(18): 2'-O-methyl
  misc_feature (19)..(19): 2'-deoxy-2'-fluoro
  misc_feature (1)..(19): ribonucleotide unmodified or modified as described for this sequence
  misc_feature (21)..(21): 3'-3 attached terminal deoxyabasic moeity
aacuuaaagccagucaggctt

SEQ ID NO: 1780 - DNA, 21 bp, Artificial Sequence
  Synthetic
  misc_feature (1)..(1): 5'-3 attached terminal deoxyabasic moeity
  misc_feature (1)..(1): 2'-O-methyl
  misc_feature (2)..(2): 2'-deoxy-2'-fluoro
  misc_feature (3)..(8): 2'-O-methyl
  misc_feature (9)..(11): 2'-deoxy-2'-fluoro
  misc_feature (12)..(12): 2'-O-methyl
  misc_feature (13)..(14): 2'-deoxy-2'-fluoro
  misc_feature (15)..(15): 2'-O-methyl
  misc_feature (16)..(18): 2'-deoxy-2'-fluoro
  misc_feature (19)..(19): 2'-O-methyl
  misc_feature (1)..(19): ribonucleotide unmodified or modified as described for this sequence
  misc_feature (21)..(21): 3'-3 attached terminal deoxyabasic moeity
gcaagggauuuguuauccatt

SEQ ID NO: 1781 - DNA, 21 bp, Artificial Sequence
  Synthetic
  misc_feature (1)..(1): 2'-O-methyl
  misc_feature (1)..(1): 5'-3 attached terminal deoxyabasic moeity
  misc_feature (2)..(2): 2'-deoxy-2'-fluoro
  misc_feature (3)..(3): 2'-O-methyl
  misc_feature (4)..(5): 2'-deoxy-2'-fluoro
  misc_feature (6)..(7): 2'-O-methyl
  misc_feature (8)..(8): 2'-deoxy-2'-fluoro
  misc_feature (9)..(11): 2'-O-methyl
  misc_feature (12)..(14): 2'-deoxy-2'-fluoro
  misc_feature (15)..(16): 2'-O-methyl
  misc_feature (17)..(19): 2'-deoxy-2'-fluoro
  misc_feature (1)..(19): ribonucleotide unmodified or modified as described for this sequence
  misc_feature (21)..(21): 3'-3 attached terminal deoxyabasic moeity
augucaacagauccgacuutt

SEQ ID NO: 1782 - DNA, 21 bp, Artificial Sequence
  Synthetic
  misc_feature (1)..(1): 5'-3 attached terminal deoxyabasic moeity
  misc_feature (1)..(2): 2'-deoxy-2'-fluoro
  misc_feature (3)..(4): 2'-O-methyl
  misc_feature (5)..(9): 2'-deoxy-2'-fluoro
  misc_feature (10)..(11): 2'-O-methyl
  misc_feature (12)..(12): 2'-deoxy-2'-fluoro
  misc_feature (13)..(13): 2'-O-methyl
  misc_feature (14)..(14): 2'-deoxy-2'-fluoro
  misc_feature (15)..(17): 2'-O-methyl
  misc_feature (18)..(18): 2'-deoxy-2'-fluoro
  misc_feature (19)..(19): 2'-O-methyl
  misc_feature (1)..(19): ribonucleotide unmodified or modified as described for this sequence
  misc_feature (21)..(21): 3'-3 attached terminal deoxyabasic moeity
uuggccucugauacagacatt

SEQ ID NO: 1783 - DNA, 21 bp, Artificial Sequence
  Synthetic
  misc_feature (1)..(2): 2'-O-methyl
  misc_feature (3)..(4): 2'-deoxy-2'-fluoro
  misc_feature (5)..(5): 2'-O-methyl
  misc_feature (6)..(7): 2'-deoxy-2'-fluoro
  misc_feature (8)..(8): 2'-O-methyl
  misc_feature (9)..(10): 2'-deoxy-2'-fluoro
  misc_feature (11)..(11): 2'-O-methyl
  misc_feature (12)..(12): 2'-deoxy-2'-fluoro
  misc_feature (13)..(13): 2'-O-methyl
  misc_feature (14)..(16): 2'-deoxy-2'-fluoro
  misc_feature (17)..(17): 2'-O-methyl
  misc_feature (18)..(19): 2'-deoxy-2'-fluoro
  misc_feature (20)..(20): Phosphorothioate 3'-Internucleotide Linkage
  misc_feature (1)..(19): ribonucleotide unmodified or modified as described for this sequence
aauuguugucacgcuugcutt

SEQ ID NO: 1784 - DNA, 21 bp, Artificial Sequence
  Synthetic
  misc_feature (1)..(2): 2'-O-methyl
  misc_feature (3)..(3): 2'-deoxy-2'-fluoro
  misc_feature (4)..(4): 2'-O-methyl
  misc_feature (5)..(5): 2'-deoxy-2'-fluoro
  misc_feature (6)..(7): 2'-O-methyl
  misc_feature (8)..(8): 2'-deoxy-2'-fluoro
  misc_feature (9)..(9): 2'-O-methyl
  misc_feature (10)..(13): 2'-deoxy-2'-fluoro
  misc_feature (14)..(16): 2'-O-methyl
  misc_feature (17)..(18): 2'-deoxy-2'-fluoro
  misc_feature (19)..(19): 2'-O-methyl
  misc_feature (20)..(20): Phosphorothioate 3'-Internucleotide Linkage
  misc_feature (1)..(19): ribonucleotide unmodified or modified as described for this sequence
gacaugguguuccaagcugtt

SEQ ID NO: 1785 - DNA, 21 bp, Artificial Sequence
  Synthetic
  misc_feature (1)..(4): 2'-deoxy-2'-fluoro
  misc_feature (5)..(7): 2'-O-methyl
  misc_feature (8)..(9): 2'-deoxy-2'-fluoro
  misc_feature (10)..(11): 2'-O-methyl
  misc_feature (12)..(13): 2'-deoxy-2'-fluoro
  misc_feature (14)..(19): 2'-O-methyl
  misc_feature (20)..(20): Phosphorothioate 3'-Internucleotide Linkage
  misc_feature (1)..(19): ribonucleotide unmodified or modified as described for this sequence
uucugagucagcugggaaatt

SEQ ID NO: 1786 - DNA, 21 bp, Artificial Sequence
  Synthetic
  misc_feature (1)..(1): 2'-O-methyl
  misc_feature (2)..(5): 2'-deoxy-2'-fluoro
  misc_feature (6)..(8): 2'-O-methyl
  misc_feature (9)..(10): 2'-deoxy-2'-fluoro
  misc_feature (11)..(12): 2'-O-methyl
  misc_feature (13)..(14): 2'-deoxy-2'-fluoro
  misc_feature (15)..(19): 2'-O-methyl
  misc_feature (20)..(20): Phosphorothioate 3'-Internucleotide Linkage
  misc_feature (1)..(19): ribonucleotide unmodified or modified as described for this sequence
guucugagucagcugggaatt

SEQ ID NO: 1787 - DNA, 21 bp, Artificial Sequence
  Synthetic
  misc_feature (1)..(1): 2'-O-methyl
  misc_feature (2)..(4): 2'-deoxy-2'-fluoro
  misc_feature (5)..(6): 2'-O-methyl
  misc_feature (7)..(8): 2'-deoxy-2'-fluoro
  misc_feature (9)..(10): 2'-O-methyl
  misc_feature (11)..(14): 2'-deoxy-2'-fluoro
  misc_feature (15)..(17): 2'-O-methyl
  misc_feature (18)..(19): 2'-deoxy-2'-fluoro
  misc_feature (20)..(20): Phosphorothioate 3'-Internucleotide Linkage
  misc_feature (1)..(19): ribonucleotide unmodified or modified as described for this sequence
gccugacuggcuuuaaguutt

SEQ ID NO: 1788 - DNA, 21 bp, Artificial Sequence
  Synthetic
  misc_feature (1)..(1): 2'-deoxy-2'-fluoro
  misc_feature (2)..(4): 2'-O-methyl
  misc_feature (5)..(5): 2'-deoxy-2'-fluoro
  misc_feature (6)..(7): 2'-O-methyl
  misc_feature (8)..(8): 2'-deoxy-2'-fluoro
  misc_feature (9)..(11): 2'-O-methyl
  misc_feature (12)..(17): 2'-deoxy-2'-fluoro
  misc_feature (18)..(18): 2'-O-methyl
  misc_feature (19)..(19): 2'-deoxy-2'-fluoro
  misc_feature (20)..(20): Phosphorothioate 3'-Internucleotide Linkage
  misc_feature (1)..(19): ribonucleotide unmodified or modified as described for this sequence
uggauaacaaaucccuugctt

SEQ ID NO: 1789 - DNA, 21 bp, Artificial Sequence
  Synthetic
  misc_feature (1)..(3): 2'-O-methyl
  misc_feature (4)..(5): 2'-deoxy-2'-fluoro
  misc_feature (6)..(8): 2'-O-methyl
  misc_feature (9)..(11): 2'-deoxy-2'-fluoro
  misc_feature (12)..(12): 2'-O-methyl
  misc_feature (13)..(14): 2'-deoxy-2'-fluoro
  misc_feature (15)..(16): 2'-O-methyl
  misc_feature (17)..(17): 2'-deoxy-2'-fluoro
  misc_feature (18)..(18): 2'-O-methyl
  misc_feature (19)..(19): 2'-deoxy-2'-fluoro
  misc_feature (20)..(20): Phosphorothioate 3'-Internucleotide Linkage
  misc_feature (1)..(19): ribonucleotide unmodified or modified as described for this sequence
aagucggaucuguugacautt

SEQ ID NO: 1790 - DNA, 21 bp, Artificial Sequence
  Synthetic
  misc_feature (1)..(1): 2'-deoxy-2'-fluoro
  misc_feature (2)..(2): 2'-O-methyl
  misc_feature (3)..(5): 2'-deoxy-2'-fluoro
  misc_feature (6)..(6): 2'-O-methyl
  misc_feature (7)..(7): 2'-deoxy-2'-fluoro
  misc_feature (8)..(8): 2'-O-methyl
  misc_feature (9)..(10): 2'-deoxy-2'-fluoro
  misc_feature (11)..(15): 2'-O-methyl
  misc_feature (16)..(17): 2'-deoxy-2'-fluoro
  misc_feature (18)..(19): 2'-O-methyl
  misc_feature (20)..(20): Phosphorothioate 3'-Internucleotide Linkage
  misc_feature (1)..(19): ribonucleotide unmodified or modified as described for this sequence
ugucuguaucagaggccaatt

SEQ ID NO: 1791 - DNA, 21 bp, Artificial Sequence
  Synthetic
  misc_feature (1)..(1): 5'-3 attached terminal deoxyabasic moeity
  misc_feature (1)..(19): ribonucleotide unmodified or modified as described for this sequence
  misc_feature (21)..(21): 3'-3 attached terminal deoxyabasic moeity
agcaagcgugacaacaauutt

SEQ ID NO: 1792 - DNA, 21 bp, Artificial Sequence
  Synthetic
  misc_feature (1)..(1): 5'-3 attached terminal deoxyabasic moeity
  misc_feature (1)..(19): ribonucleotide unmodified or modified as described for this sequence
  misc_feature (21)..(21): 3'-3 attached terminal deoxyabasic moeity
cagcuuggaacaccauguctt

SEQ ID NO: 1793 - DNA, 21 bp, Artificial Sequence
  Synthetic
  misc_feature (1)..(1): 5'-3 attached terminal deoxyabasic moeity
  misc_feature (1)..(19): ribonucleotide unmodified or modified as described for this sequence
  misc_feature (21)..(21): 3'-3 attached terminal deoxyabasic moeity
uuucccagcugacucagaatt

SEQ ID NO: 1794 - DNA, 21 bp, Artificial Sequence
  Synthetic
  misc_feature (1)..(1): 5'-3 attached terminal deoxyabasic moeity
  misc_feature (1)..(19): ribonucleotide unmodified or modified as described for this sequence
  misc_feature (21)..(21): 3'-3 attached terminal deoxyabasic moeity
uucccagcugacucagaactt

SEQ ID NO: 1795 - DNA, 21 bp, Artificial Sequence
  Synthetic
  misc_feature (1)..(1): 5'-3 attached terminal deoxyabasic moeity
  misc_feature (1)..(19): ribonucleotide unmodified or modified as described for this sequence
  misc_feature (21)..(21): 3'-3 attached terminal deoxyabasic moeity
aacuuaaagccagucaggctt

SEQ ID NO: 1796 - DNA, 21 bp, Artificial Sequence
  Synthetic
  misc_feature (1)..(1): 5'-3 attached terminal deoxyabasic moeity
  misc_feature (1)..(19): ribonucleotide unmodified or modified as described for this sequence
  misc_feature (21)..(21): 3'-3 attached terminal deoxyabasic moeity
gcaagggauuuguuauccatt

SEQ ID NO: 1797 - DNA, 21 bp, Artificial Sequence
  Synthetic
  misc_feature (1)..(1): 5'-3 attached terminal deoxyabasic moeity
  misc_feature (1)..(19): ribonucleotide unmodified or modified as described for this sequence
  misc_feature (21)..(21): 3'-3 attached terminal deoxyabasic moeity
augucaacagauccgacuutt

SEQ ID NO: 1798 - DNA, 21 bp, Artificial Sequence
  Synthetic
  misc_feature (1)..(1): 5'-3 attached terminal deoxyabasic moeity
  misc_feature (1)..(19): ribonucleotide unmodified or modified as described for this sequence
  misc_feature (21)..(21): 3'-3 attached terminal deoxyabasic moeity
uuggccucugauacagacatt

SEQ ID NO: 1799 - DNA, 21 bp, Artificial Sequence
  Synthetic
  misc_feature (20)..(20): Phosphorothioate 3'-Internucleotide Linkage
  misc_feature (1)..(19): ribonucleotide unmodified or modified as described for this sequence
aauuguugucacgcuugcutt

SEQ ID NO: 1800 - DNA, 21 bp, Artificial Sequence
  Synthetic
  misc_feature (20)..(20): Phosphorothioate 3'-Internucleotide Linkage
  misc_feature (1)..(19): ribonucleotide unmodified or modified as described for this sequence
gacaugguguuccaagcugtt

SEQ ID NO: 1801 - DNA, 21 bp, Artificial Sequence
  Synthetic
  misc_feature (20)..(20): Phosphorothioate 3'-Internucleotide Linkage
  misc_feature (1)..(19): ribonucleotide unmodified or modified as described for this sequence
uucugagucagcugggaaatt

SEQ ID NO: 1802 - DNA, 21 bp, Artificial Sequence
  Synthetic
  misc_feature (20)..(20): Phosphorothioate 3'-Internucleotide Linkage
  misc_feature (1)..(19): ribonucleotide unmodified or modified as described for this sequence
guucugagucagcugggaatt

SEQ ID NO: 1803 - DNA, 21 bp, Artificial Sequence
  Synthetic
  misc_feature (20)..(20): Phosphorothioate 3'-Internucleotide Linkage
  misc_feature (1)..(19): ribonucleotide unmodified or modified as described for this sequence
gccugacuggcuuuaaguutt

SEQ ID NO: 1804 - DNA, 21 bp, Artificial Sequence
  Synthetic
  misc_feature (20)..(20): Phosphorothioate 3'-Internucleotide Linkage
  misc_feature (1)..(19): ribonucleotide unmodified or modified as described for this sequence
uggauaacaaaucccuugctt

SEQ ID NO: 1805 - DNA, 21 bp, Artificial Sequence
  Synthetic
  misc_feature (20)..(20): Phosphorothioate 3'-Internucleotide Linkage
  misc_feature (1)..(19): ribonucleotide unmodified or modified as described for this sequence
aagucggaucuguugacautt

SEQ ID NO: 1806 - DNA, 21 bp, Artificial Sequence
  Synthetic
  misc_feature (20)..(20): Phosphorothioate 3'-Internucleotide Linkage
  misc_feature (1)..(19): ribonucleotide unmodified or modified as described for this sequence
ugucuguaucagaggccaatt

SEQ ID NO: 1807 - DNA, 21 bp, Artificial Sequence
  Synthetic
  misc_feature (1)..(2): 2'-O-methyl
  misc_feature (3)..(4): 2'-deoxy-2'-fluoro
  misc_feature (5)..(5): 2'-O-methyl
  misc_feature (6)..(7): 2'-deoxy-2'-fluoro
  misc_feature (8)..(8): 2'-O-methyl
  misc_feature (9)..(10): 2'-deoxy-2'-fluoro
  misc_feature (11)..(11): 2'-O-methyl
  misc_feature (12)..(12): 2'-deoxy-2'-fluoro
  misc_feature (13)..(13): 2'-O-methyl
  misc_feature (14)..(16): 2'-deoxy-2'-fluoro
  misc_feature (17)..(17): 2'-O-methyl
  misc_feature (18)..(19): 2'-deoxy-2'-fluoro
  misc_feature (1)..(19): ribonucleotide unmodified or modified as described for this sequence
  misc_feature (21)..(21): 3'-3 attached terminal deoxyabasic moeity
aauuguugucacgcuugcutt

SEQ ID NO: 1808 - DNA, 21 bp, Artificial Sequence
  Synthetic
  misc_feature (1)..(2): 2'-O-methyl
  misc_feature (3)..(3): 2'-deoxy-2'-fluoro
  misc_feature (4)..(4): 2'-O-methyl
  misc_feature (5)..(5): 2'-deoxy-2'-fluoro
  misc_feature (6)..(7): 2'-O-methyl
  misc_feature (8)..(8): 2'-deoxy-2'-fluoro
  misc_feature (9)..(9): 2'-O-methyl
  misc_feature (10)..(13): 2'-deoxy-2'-fluoro
  misc_feature (14)..(16): 2'-O-methyl
  misc_feature (17)..(18): 2'-deoxy-2'-fluoro
  misc_feature (19)..(19): 2'-O-methyl
  misc_feature (1)..(19): ribonucleotide unmodified or modified as described for this sequence
  misc_feature (21)..(21): 3'-3 attached terminal deoxyabasic moeity
gacaugguguuccaagcugtt

SEQ ID NO: 1809 - DNA, 21 bp, Artificial Sequence
  Synthetic
  misc_feature (1)..(4): 2'-deoxy-2'-fluoro
  misc_feature (5)..(7): 2'-O-methyl
  misc_feature (8)..(9): 2'-deoxy-2'-fluoro
  misc_feature (10)..(11): 2'-O-methyl
  misc_feature (12)..(13): 2'-deoxy-2'-fluoro
  misc_feature (14)..(19): 2'-O-methyl
  misc_feature (1)..(19): ribonucleotide unmodified or modified as described for this sequence
  misc_feature (21)..(21): 3'-3 attached terminal deoxyabasic moeity
uucugagucagcugggaaatt

SEQ ID NO: 1810 - DNA, 21 bp, Artificial Sequence
  Synthetic
  misc_feature (1)..(1): 2'-O-methyl
  misc_feature (2)..(5): 2'-deoxy-2'-fluoro
  misc_feature (6)..(8): 2'-O-methyl
  misc_feature (9)..(10): 2'-deoxy-2'-fluoro
  misc_feature (11)..(12): 2'-O-methyl
  misc_feature (13)..(14): 2'-deoxy-2'-fluoro
  misc_feature (15)..(19): 2'-O-methyl
  misc_feature (1)..(19): ribonucleotide unmodified or modified as described for this sequence
  misc_feature (21)..(21): 3'-3 attached terminal deoxyabasic moeity
guucugagucagcugggaatt

SEQ ID NO: 1811 - DNA, 21 bp, Artificial Sequence
  Synthetic
  misc_feature (1)..(1): 2'-O-methyl
  misc_feature (2)..(4): 2'-deoxy-2'-fluoro
  misc_feature (5)..(6): 2'-O-methyl
  misc_feature (7)..(8): 2'-deoxy-2'-fluoro
  misc_feature (9)..(10): 2'-O-methyl
  misc_feature (11)..(14): 2'-deoxy-2'-fluoro
  misc_feature (15)..(17): 2'-O-methyl
  misc_feature (18)..(19): 2'-deoxy-2'-fluoro
  misc_feature (1)..(19): ribonucleotide unmodified or modified as described for this sequence
  misc_feature (21)..(21): 3'-3 attached terminal deoxyabasic moeity
gccugacuggcuuuaaguutt

SEQ ID NO: 1812 - DNA, 21 bp, Artificial Sequence
  Synthetic
  misc_feature (1)..(1): 2'-deoxy-2'-fluoro
  misc_feature (2)..(4): 2'-O-methyl
  misc_feature (5)..(5): 2'-deoxy-2'-fluoro
  misc_feature (6)..(7): 2'-O-methyl
  misc_feature (8)..(8): 2'-deoxy-2'-fluoro
  misc_feature (9)..(11): 2'-O-methyl
  misc_feature (12)..(17): 2'-deoxy-2'-fluoro
  misc_feature (18)..(18): 2'-O-methyl
  misc_feature (19)..(19): 2'-deoxy-2'-fluoro
  misc_feature (1)..(19): ribonucleotide unmodified or modified as described for this sequence
  misc_feature (21)..(21): 3'-3 attached terminal deoxyabasic moeity
uggauaacaaaucccuugctt

SEQ ID NO: 1813 - DNA, 21 bp, Artificial Sequence
  Synthetic
  misc_feature (1)..(3): 2'-O-methyl
  misc_feature (4)..(5): 2'-deoxy-2'-fluoro
  misc_feature (6)..(8): 2'-O-methyl
  misc_feature (9)..(11): 2'-deoxy-2'-fluoro
  misc_feature (12)..(12): 2'-O-methyl
  misc_feature (13)..(14): 2'-deoxy-2'-fluoro
  misc_feature (15)..(16): 2'-O-methyl
  misc_feature (17)..(17): 2'-deoxy-2'-fluoro
  misc_feature (18)..(18): 2'-O-methyl
  misc_feature (19)..(19): 2'-deoxy-2'-fluoro
  misc_feature (1)..(19): ribonucleotide unmodified or modified as described for this sequence
  misc_feature (21)..(21): 3'-3 attached terminal deoxyabasic moeity
aagucggaucuguugacautt

SEQ ID NO: 1814 - DNA, 21 bp, Artificial Sequence
  Synthetic
  misc_feature (1)..(1): 2'-deoxy-2'-fluoro
  misc_feature (2)..(2): 2'-O-methyl
  misc_feature (3)..(5): 2'-deoxy-2'-fluoro
  misc_feature (6)..(6): 2'-O-methyl
  misc_feature (7)..(7): 2'-deoxy-2'-fluoro
  misc_feature (8)..(8): 2'-O-methyl
  misc_feature (9)..(10): 2'-deoxy-2'-fluoro
  misc_feature (11)..(15): 2'-O-methyl
  misc_feature (16)..(17): 2'-deoxy-2'-fluoro
  misc_feature (18)..(19): 2'-O-methyl
  misc_feature (1)..(19): ribonucleotide unmodified or modified as described for this sequence
  misc_feature (21)..(21): 3'-3 attached terminal deoxyabasic moeity
ugucuguaucagaggccaatt

SEQ ID NO: 1815 - DNA, 21 bp, Artificial Sequence
  Synthetic
  misc_feature (1)..(19): ribonucleotide unmodified or modified as described for this sequence
  misc_feature (21)..(21): 3'-3 attached terminal deoxyabasic moeity
aauuguugucacgcuugcutt

SEQ ID NO: 1816 - DNA, 21 bp, Artificial Sequence
  Synthetic
  misc_feature (1)..(19): ribonucleotide unmodified or modified as described for this sequence
  misc_feature (21)..(21): 3'-3 attached terminal deoxyabasic moeity
gacaugguguuccaagcugtt

SEQ ID NO: 1817 - DNA, 21 bp, Artificial Sequence
  Synthetic
  misc_feature (1)..(19): ribonucleotide unmodified or modified as described for this sequence
  misc_feature (21)..(21): 3'-3 attached terminal deoxyabasic moeity
uucugagucagcugggaaatt

SEQ ID NO: 1818 - DNA, 21 bp, Artificial Sequence
  Synthetic
  misc_feature (1)..(19): ribonucleotide unmodified or modified as described for this sequence
  misc_feature (21)..(21): 3'-3 attached terminal deoxyabasic moeity
guucugagucagcugggaatt

SEQ ID NO: 1819 - DNA, 21 bp, Artificial Sequence
  Synthetic
  misc_feature (1)..(19): ribonucleotide unmodified or modified as described for this sequence
  misc_feature (21)..(21): 3'-3 attached terminal deoxyabasic moeity
gccugacuggcuuuaaguutt

SEQ ID NO: 1820 - DNA, 21 bp, Artificial Sequence
  Synthetic
  misc_feature (1)..(19): ribonucleotide unmodified or modified as described for this sequence
  misc_feature (21)..(21): 3'-3 attached terminal deoxyabasic moeity
uggauaacaaaucccuugctt

SEQ ID NO: 1821 - DNA, 21 bp, Artificial Sequence
  Synthetic
  misc_feature (1)..(19): ribonucleotide unmodified or modified as described for this sequence
  misc_feature (21)..(21): 3'-3 attached terminal deoxyabasic moeity
aagucggaucuguugacautt

SEQ ID NO: 1822 - DNA, 21 bp, Artificial Sequence
  Synthetic
  misc_feature (1)..(19): ribonucleotide unmodified or modified as described for this sequence
  misc_feature (21)..(21): 3'-3 attached terminal deoxyabasic moeity
ugucuguaucagaggccaatt

SEQ ID NO: 1823 - DNA, 21 bp, Artificial Sequence
  Synthetic
  misc_feature (1)..(1): 5'-3 attached terminal deoxyabasic moeity
  misc_feature (1)..(3): 2'-deoxy-2'-fluoro
  misc_feature (6)..(8): 2'-deoxy-2'-fluoro
  misc_feature (12)..(12): 2'-deoxy-2'-fluoro
  misc_feature (15)..(16): 2'-deoxy-2'-fluoro
  misc_feature (18)..(18): 2'-deoxy-2'-fluoro
  misc_feature (1)..(19): ribonucleotide unmodified or modified as described for this sequence
  misc_feature (21)..(21): 3'-3 attached terminal deoxyabasic moeity
uucagccuagacaacuguatt

SEQ ID NO: 1824 - DNA, 21 bp, Artificial Sequence
  Synthetic
  misc_feature (1)..(1): 2'-deoxy-2'-fluoro
  misc_feature (2)..(2): 2'-O-methyl
  misc_feature (3)..(3): 2'-deoxy-2'-fluoro
  misc_feature (4)..(5): 2'-O-methyl
  misc_feature (6)..(7): 2'-deoxy-2'-fluoro
  misc_feature (8)..(8): 2'-O-methyl
  misc_feature (9)..(11): 2'-deoxy-2'-fluoro
  misc_feature (12)..(14): 2'-O-methyl
  misc_feature (15)..(16): 2'-deoxy-2'-fluoro
  misc_feature (17)..(19): 2'-O-methyl
  misc_feature (20)..(20): Phosphorothioate 3'-Internucleotide Linkage
  misc_feature (1)..(19): ribonucleotide unmodified or modified as described for this sequence
uacaguugucuaggcugaatt

SEQ ID NO: 1825 - DNA, 21 bp, Artificial Sequence
  Synthetic
  misc_feature (1)..(19): ribonucleotide unmodified or modified as described for this sequence
cuacuuugcucaguaccactt

SEQ ID NO: 1826 - DNA, 21 bp, Artificial Sequence
  Synthetic
  misc_feature (1)..(19): ribonucleotide unmodified or modified as described for this sequence
ucugucuuugugggagggutt

SEQ ID NO: 1827 - DNA, 21 bp, Artificial Sequence
  Synthetic
  misc_feature (1)..(19): ribonucleotide unmodified or modified as described for this sequence
caacuggcuucugugcacutt

SEQ ID NO: 1828 - DNA, 21 bp, Artificial Sequence
  Synthetic
  misc_feature (1)..(19): ribonucleotide unmodified or modified as described for this sequence
cagagugaggauguguuuutt

SEQ ID NO: 1829 - DNA, 21 bp, Artificial Sequence
  Synthetic
  misc_feature (1)..(19): ribonucleotide unmodified or modified as described for this sequence
cccaugucaccucagcugatt

SEQ ID NO: 1830 - DNA, 21 bp, Artificial Sequence
  Synthetic
  misc_feature (1)..(19): ribonucleotide unmodified or modified as described for this sequence
aagggucuucuuggcagcutt

SEQ ID NO: 1831 - DNA, 21 bp, Artificial Sequence
  Synthetic
  misc_feature (1)..(19): ribonucleotide unmodified or modified as described for this sequence
acucuaagcuggagcucuutt

SEQ ID NO: 1832 - DNA, 21 bp, Artificial Sequence
  Synthetic
  misc_feature (1)..(19): ribonucleotide unmodified or modified as described for this sequence
ggcuguaaucaguuaugcctt

SEQ ID NO: 1833 - DNA, 21 bp, Artificial Sequence
  Synthetic
  misc_feature (1)..(19): ribonucleotide unmodified or modified as described for this sequence
gugguacugagcaaaguagtt

SEQ ID NO: 1834 - DNA, 21 bp, Artificial Sequence
  Synthetic
  misc_feature (1)..(19): ribonucleotide unmodified or modified as described for this sequence
acccucccacaaagacagatt

SEQ ID NO: 1835 - DNA, 21 bp, Artificial Sequence
  Synthetic
  misc_feature (1)..(19): ribonucleotide unmodified or modified as described for this sequence
agugcacagaagccaguugtt

SEQ ID NO: 1836 - DNA, 21 bp, Artificial Sequence
  Synthetic
  misc_feature (1)..(19): ribonucleotide unmodified or modified as described for this sequence
aaaacacauccucacucugtt

SEQ ID NO: 1837 - DNA, 21 bp, Artificial Sequence
  Synthetic
  misc_feature (1)..(19): ribonucleotide unmodified or modified as described for this sequence
ucagcugaggugacaugggtt

SEQ ID NO: 1838 - DNA, 21 bp, Artificial Sequence
  Synthetic
  misc_feature (1)..(19): ribonucleotide unmodified or modified as described for this sequence
agcugccaagaagacccuutt

SEQ ID NO: 1839 - DNA, 21 bp, Artificial Sequence
  Synthetic
  misc_feature (1)..(19): ribonucleotide unmodified or modified as described for this sequence
aagagcuccagcuuagagutt

SEQ ID NO: 1840 - DNA, 21 bp, Artificial Sequence
  Synthetic
  misc_feature (1)..(19): ribonucleotide unmodified or modified as described for this sequence
ggcauaacugauuacagcctt

SEQ ID NO: 1841 - DNA, 21 bp, Artificial Sequence
  Synthetic
  misc_feature (1)..(2): 2'-deoxy-2'-fluoro
  misc_feature (1)..(1): 5'-3 attached terminal deoxyabasic moeity
  misc_feature (4)..(7): 2'-deoxy-2'-fluoro
  misc_feature (9)..(11): 2'-deoxy-2'-fluoro
  misc_feature (14)..(14): 2'-deoxy-2'-fluoro
  misc_feature (16)..(17): 2'-deoxy-2'-fluoro
  misc_feature (19)..(19): 2'-deoxy-2'-fluoro
  misc_feature (1)..(19): ribonucleotide unmodified or modified as described for this sequence
  misc_feature (21)..(21): 3'-3 attached terminal deoxyabasic moeity
cuacuuugcucaguaccactt

SEQ ID NO: 1842 - DNA, 21 bp, Artificial Sequence
  Synthetic
  misc_feature (1)..(3): 2'-deoxy-2'-fluoro
  misc_feature (1)..(1): 5'-3 attached terminal deoxyabasic moeity
  misc_feature (5)..(9): 2'-deoxy-2'-fluoro
  misc_feature (11)..(11): 2'-deoxy-2'-fluoro
  misc_feature (19)..(19): 2'-deoxy-2'-fluoro
  misc_feature (1)..(19): ribonucleotide unmodified or modified as described for this sequence
  misc_feature (21)..(21): 3'-3 attached terminal deoxyabasic moeity
ucugucuuugugggagggutt

SEQ ID NO: 1843 - DNA, 21 bp, Artificial Sequence
  Synthetic
  misc_feature (1)..(1): 2'-deoxy-2'-fluoro
  misc_feature (1)..(1): 5'-3 attached terminal deoxyabasic moeity
  misc_feature (4)..(5): 2'-deoxy-2'-fluoro
  misc_feature (8)..(12): 2'-deoxy-2'-fluoro
  misc_feature (14)..(14): 2'-deoxy-2'-fluoro
  misc_feature (16)..(16): 2'-deoxy-2'-fluoro
  misc_feature (18)..(19): 2'-deoxy-2'-fluoro
  misc_feature (1)..(19): ribonucleotide unmodified or modified as described for this sequence
  misc_feature (21)..(21): 3'-3 attached terminal deoxyabasic moeity
caacuggcuucugugcacutt

SEQ ID NO: 1844 - DNA, 21 bp, Artificial Sequence
  Synthetic
  misc_feature (1)..(1): 2'-deoxy-2'-fluoro
  misc_feature (1)..(1): 5'-3 attached terminal deoxyabasic moeity
  misc_feature (6)..(6): 2'-deoxy-2'-fluoro
  misc_feature (12)..(12): 2'-deoxy-2'-fluoro
  misc_feature (14)..(14): 2'-deoxy-2'-fluoro
  misc_feature (16)..(19): 2'-deoxy-2'-fluoro
  misc_feature (1)..(19): ribonucleotide unmodified or modified as described for this sequence
  misc_feature (21)..(21): 3'-3 attached terminal deoxyabasic moeity
cagagugaggauguguuuutt

SEQ ID NO: 1845 - DNA, 21 bp, Artificial Sequence
  Synthetic
  misc_feature (1)..(3): 2'-deoxy-2'-fluoro
  misc_feature (1)..(1): 5'-3 attached terminal deoxyabasic moeity
  misc_feature (5)..(5): 2'-deoxy-2'-fluoro
  misc_feature (7)..(8): 2'-deoxy-2'-fluoro
  misc_feature (10)..(13): 2'-deoxy-2'-fluoro
  misc_feature (16)..(17): 2'-deoxy-2'-fluoro
  misc_feature (1)..(19): ribonucleotide unmodified or modified as described for this sequence
  misc_feature (21)..(21): 3'-3 attached terminal deoxyabasic moeity
cccaugucaccucagcugatt

SEQ ID NO: 1846 - DNA, 21 bp, Artificial Sequence
  Synthetic
  misc_feature (1)..(1): 5'-3 attached terminal deoxyabasic moeity
  misc_feature (6)..(12): 3'-3 attached terminal deoxyabasic moeity
  misc_feature (15)..(15): 3'-3 attached terminal deoxyabasic moeity
  misc_feature (18)..(19): 3'-3 attached terminal deoxyabasic moeity
  misc_feature (1)..(19): ribonucleotide unmodified or modified as described for this sequence
  misc_feature (21)..(21): 3'-3 attached terminal deoxyabasic moeity
aagggucuucuuggcagcutt

SEQ ID NO: 1847 - DNA, 21 bp, Artificial Sequence
  Synthetic
  misc_feature (1)..(1): 5'-3 attached terminal deoxyabasic moiety
  misc_feature (2)..(5): 2'-deoxy-2'-fluoro
  misc_feature (9)..(10): 2'-deoxy-2'-fluoro
  misc_feature (15)..(19): 2'-deoxy-2'-fluoro
  misc_feature (1)..(19): ribonucleotide unmodified or modified as described for this sequence
  misc_feature (21)..(21): 3'-3 attached terminal deoxyabasic moiety
acucuaagcuggagcucuutt

SEQ ID NO: 1848 - DNA, 21 bp, Artificial Sequence
  Synthetic
  misc_feature (1)..(1): 5'-3 attached terminal deoxyabasic moiety
  misc_feature (3)..(4): 2'-deoxy-2'-fluoro
  misc_feature (6)..(6): 2'-deoxy-2'-fluoro
  misc_feature (9)..(10): 2'-deoxy-2'-fluoro
  misc_feature (13)..(14): 2'-deoxy-2'-fluoro
  misc_feature (16)..(16): 2'-deoxy-2'-fluoro
  misc_feature (18)..(19): 2'-deoxy-2'-fluoro
  misc_feature (1)..(19): ribonucleotide unmodified or modified as described for this sequence
  misc_feature (21)..(21): 3'-3 attached terminal deoxyabasic moiety
ggcuguaaucaguuaugcctt

SEQ ID NO: 1849 - DNA, 21 bp, Artificial Sequence
  Synthetic
  misc_feature (2)..(2): 2'-deoxy-2'-fluoro
  misc_feature (5)..(5): 2'-deoxy-2'-fluoro
  misc_feature (7)..(8): 2'-deoxy-2'-fluoro
  misc_feature (12)..(12): 2'-deoxy-2'-fluoro
  misc_feature (17)..(17): 2'-deoxy-2'-fluoro
  misc_feature (20)..(21): internucleotide phosphorothioate linkage
  misc_feature (1)..(19): ribonucleotide unmodified or modified as described for this sequence
gugguacugagcaaaguagtt

SEQ ID NO: 1850 - DNA, 21 bp, Artificial Sequence
  Synthetic
  misc_feature (2)..(8): 2'-deoxy-2'-fluoro
  misc_feature (10)..(10): 2'-deoxy-2'-fluoro
  misc_feature (16)..(16): 2'-deoxy-2'-fluoro
  misc_feature (20)..(21): internucleotide phosphorothioate linkage
  misc_feature (1)..(19): ribonucleotide unmodified or modified as described for this sequence
acccucccacaaagacagatt

SEQ ID NO: 1851 - DNA, 21 bp, Artificial Sequence
  Synthetic
  misc_feature (3)..(3): 2'-deoxy-2'-fluoro
  misc_feature (5)..(5): 2'-deoxy-2'-fluoro
  misc_feature (7)..(7): 2'-deoxy-2'-fluoro
  misc_feature (13)..(14): 2'-deoxy-2'-fluoro
  misc_feature (17)..(18): 2'-deoxy-2'-fluoro
  misc_feature (20)..(21): internucleotide phosphorothioate linkage
  misc_feature (1)..(19): ribonucleotide unmodified or modified as described for this sequence
agugcacagaagccaguugtt

SEQ ID NO: 1852 - DNA, 21 bp, Artificial Sequence
  Synthetic
  misc_feature (5)..(5): 2'-deoxy-2'-fluoro
  misc_feature (7)..(7): 2'-deoxy-2'-fluoro
  misc_feature (9)..(13): 2'-deoxy-2'-fluoro
  misc_feature (15)..(18): 2'-deoxy-2'-fluoro
  misc_feature (20)..(21): internucleotide phosphorothioate linkage
  misc_feature (1)..(19): ribonucleotide unmodified or modified as described for this sequence
aaaacacauccucacucugtt

SEQ ID NO: 1853 - DNA, 21 bp, Artificial Sequence
  Synthetic
  misc_feature (1)..(2): 2'-deoxy-2'-fluoro
  misc_feature (5)..(6): 2'-deoxy-2'-fluoro
  misc_feature (11)..(11): 2'-deoxy-2'-fluoro
  misc_feature (14)..(14): 2'-deoxy-2'-fluoro
  misc_feature (16)..(16): 2'-deoxy-2'-fluoro
  misc_feature (20)..(21): internucleotide phosphorothioate linkage
  misc_feature (1)..(19): ribonucleotide unmodified or modified as described for this sequence
ucagcugaggugacaugggtt

SEQ ID NO: 1854 - DNA, 21 bp, Artificial Sequence
  Synthetic
  misc_feature (3)..(4): 2'-deoxy-2'-fluoro
  misc_feature (6)..(7): 2'-deoxy-2'-fluoro
  misc_feature (15)..(19): 2'-deoxy-2'-fluoro
  misc_feature (20)..(21): internucleotide phosphorothioate linkage
  misc_feature (1)..(19): ribonucleotide unmodified or modified as described for this sequence
agcugccaagaagacccuutt

SEQ ID NO: 1855 - DNA, 21 bp, Artificial Sequence
  Synthetic
  misc_feature (6)..(9): 2'-deoxy-2'-fluoro
  misc_feature (12)..(14): 2'-deoxy-2'-fluoro
  misc_feature (19)..(19): 2'-deoxy-2'-fluoro
  misc_feature (20)..(21): internucleotide phosphorothioate linkage
  misc_feature (1)..(19): ribonucleotide unmodified or modified as described for this sequence
aagagcuccagcuuagagutt

SEQ ID NO: 1856 - DNA, 21 bp, Artificial Sequence
  Synthetic
  misc_feature (3)..(3): 2'-deoxy-2'-fluoro
  misc_feature (5)..(5): 2'-deoxy-2'-fluoro
  misc_feature (8)..(9): 2'-deoxy-2'-fluoro
  misc_feature (12)..(13): 2'-deoxy-2'-fluoro
  misc_feature (15)..(15): 2'-deoxy-2'-fluoro
  misc_feature (18)..(19): 2'-deoxy-2'-fluoro
  misc_feature (20)..(21): internucleotide phosphorothioate linkage
  misc_feature (1)..(19): ribonucleotide unmodified or modified as described for this sequence
ggcauaacugauuacagcctt

SEQ ID NO: 1857 - DNA, 21 bp, Artificial Sequence
  Synthetic
  misc_feature (1)..(1): 5'-3 attached terminal deoxyabasic moiety
  misc_feature (1)..(2): 2'-deoxy-2'-fluoro
  misc_feature (3)..(3): deoxy
  misc_feature (4)..(7): 2'-deoxy-2'-fluoro
  misc_feature (8)..(8): deoxy
  misc_feature (9)..(11): 2'-deoxy-2'-fluoro
  misc_feature (12)..(13): deoxy
  misc_feature (14)..(14): 2'-deoxy-2'-fluoro
  misc_feature (15)..(15): deoxy
  misc_feature (16)..(17): 2'-deoxy-2'-fluoro
  misc_feature (18)..(18): deoxy
  misc_feature (19)..(19): 2'-deoxy-2'-fluoro
  misc_feature (1)..(19): ribonucleotide unmodified or modified as described for this sequence
  misc_feature (21)..(21): 3'-3 attached terminal deoxyabasic moiety
cuacuuugcucaguaccactt

SEQ ID NO: 1858 - DNA, 21 bp, Artificial Sequence
  Synthetic
  misc_feature (1)..(1): 5'-3 attached terminal deoxyabasic moiety
  misc_feature (1)..(3): 2'-deoxy-2'-fluoro
  misc_feature (4)..(4): deoxy
  misc_feature (5)..(9): 2'-deoxy-2'-fluoro
  misc_feature (10)..(10): deoxy
  misc_feature (11)..(11): 2'-deoxy-2'-fluoro
  misc_feature (12)..(18): deoxy
  misc_feature (19)..(19): 2'-deoxy-2'-fluoro
  misc_feature (1)..(19): ribonucleotide unmodified or modified as described for this sequence
  misc_feature (21)..(21): 3'-3 attached terminal deoxyabasic moiety
ucugucuuugugggagggutt

SEQ ID NO: 1859 - DNA, 21 bp, Artificial Sequence
  Synthetic
  misc_feature (1)..(1): 5'-3 attached terminal deoxyabasic moiety
  misc_feature (1)..(1): 2'-deoxy-2'-fluoro
  misc_feature (2)..(3): deoxy
  misc_feature (4)..(5): 2'-deoxy-2'-fluoro
  misc_feature (6)..(7): deoxy
  misc_feature (8)..(12): 2'-deoxy-2'-fluoro
  misc_feature (13)..(13): deoxy
  misc_feature (14)..(14): 2'-deoxy-2'-fluoro
  misc_feature (15)..(15): deoxy
  misc_feature (16)..(16): 2'-deoxy-2'-fluoro
  misc_feature (17)..(17): deoxy
  misc_feature (18)..(19): 2'-deoxy-2'-fluoro
  misc_feature (1)..(19): ribonucleotide unmodified or modified as described for this sequence
  misc_feature (21)..(21): 3'-3 attached terminal deoxyabasic moiety
caacuggcuucugugcacutt

SEQ ID NO: 1860 - DNA, 21 bp, Artificial Sequence
  Synthetic
  misc_feature (1)..(1): 5'-3 attached terminal deoxyabasic moiety
  misc_feature (1)..(1): 2'-deoxy-2'-fluoro
  misc_feature (2)..(5): deoxy
  misc_feature (6)..(6): 2'-deoxy-2'-fluoro
  misc_feature (7)..(11): deoxy
  misc_feature (12)..(12): 2'-deoxy-2'-fluoro
  misc_feature (13)..(13): deoxy
  misc_feature (14)..(14): 2'-deoxy-2'-fluoro
  misc_feature (15)..(15): deoxy
  misc_feature (16)..(19): 2'-deoxy-2'-fluoro
  misc_feature (1)..(19): ribonucleotide unmodified or modified as described for this sequence
  misc_feature (21)..(21): 3'-3 attached terminal deoxyabasic moiety
cagagugaggauguguuuutt

SEQ ID NO: 1861 - DNA, 21 bp, Artificial Sequence
  Synthetic
  misc_feature (1)..(1): 5'-3 attached terminal deoxyabasic moiety
  misc_feature (1)..(3): 2'-deoxy-2'-fluoro
  misc_feature (4)..(4): deoxy
  misc_feature (5)..(5): 2'-deoxy-2'-fluoro
  misc_feature (6)..(6): deoxy
  misc_feature (7)..(8): 2'-deoxy-2'-fluoro
  misc_feature (9)..(9): deoxy
  misc_feature (10)..(13): 2'-deoxy-2'-fluoro
  misc_feature (14)..(15): deoxy
  misc_feature (16)..(17): 2'-deoxy-2'-fluoro
  misc_feature (18)..(19): deoxy
  misc_feature (1)..(19): ribonucleotide unmodified or modified as described for this sequence
  misc_feature (21)..(21): 3'-3 attached terminal deoxyabasic moiety
cccaugucaccucagcugatt

SEQ ID NO: 1862 - DNA, 21 bp, Artificial Sequence
  Synthetic
  misc_feature (1)..(1): 5'-3 attached terminal deoxyabasic moiety
  misc_feature (1)..(5): deoxy
  misc_feature (6)..(12): 2'-deoxy-2'-fluoro
  misc_feature (13)..(14): deoxy
  misc_feature (15)..(15): 2'-deoxy-2'-fluoro
  misc_feature (16)..(17): deoxy
  misc_feature (18)..(19): 2'-deoxy-2'-fluoro
  misc_feature (1)..(19): ribonucleotide unmodified or modified as described for this sequence
  misc_feature (21)..(21): 3'-3 attached terminal deoxyabasic moiety
aagggucuucuuggcagcutt

SEQ ID NO: 1863 - DNA, 21 bp, Artificial Sequence
  Synthetic
  misc_feature (1)..(1): 5'-3 attached terminal deoxyabasic moiety
  misc_feature (1)..(1): deoxy
  misc_feature (2)..(5): 2'-deoxy-2'-fluoro
  misc_feature (6)..(8): deoxy
  misc_feature (9)..(10): 2'-deoxy-2'-fluoro
  misc_feature (11)..(14): deoxy
  misc_feature (15)..(19): 2'-deoxy-2'-fluoro
  misc_feature (1)..(19): ribonucleotide unmodified or modified as described for this sequence
  misc_feature (21)..(21): 3'-3 attached terminal deoxyabasic moiety
acucuaagcuggagcucuutt

SEQ ID NO: 1864 - DNA, 21 bp, Artificial Sequence
  Synthetic
  misc_feature (1)..(1): 5'-3 attached terminal deoxyabasic moiety
  misc_feature (1)..(2): deoxy
  misc_feature (3)..(4): 2'-deoxy-2'-fluoro
  misc_feature (5)..(5): deoxy
  misc_feature (6)..(6): 2'-deoxy-2'-fluoro
  misc_feature (7)..(8): deoxy
  misc_feature (9)..(10): 2'-deoxy-2'-fluoro
  misc_feature (11)..(12): deoxy
  misc_feature (13)..(14): 2'-deoxy-2'-fluoro
  misc_feature (15)..(15): deoxy
  misc_feature (16)..(16): 2'-deoxy-2'-fluoro
  misc_feature (17)..(17): deoxy
  misc_feature (18)..(19): 2'-deoxy-2'-fluoro
  misc_feature (1)..(19): ribonucleotide unmodified or modified as described for this sequence
  misc_feature (21)..(21): 3'-3 attached terminal deoxyabasic moiety
ggcuguaaucaguuaugcctt

SEQ ID NO: 1865 - DNA, 21 bp, Artificial Sequence
  Synthetic
  misc_feature (1)..(1): deoxy
  misc_feature (2)..(2): 2'-deoxy-2'-fluoro
  misc_feature (3)..(4): deoxy
  misc_feature (5)..(5): 2'-deoxy-2'-fluoro
  misc_feature (6)..(6): deoxy
  misc_feature (7)..(8): 2'-deoxy-2'-fluoro
  misc_feature (9)..(11): deoxy
  misc_feature (12)..(12): 2'-deoxy-2'-fluoro
  misc_feature (13)..(16): deoxy
  misc_feature (17)..(17): 2'-deoxy-2'-fluoro
  misc_feature (18)..(19): deoxy
  misc_feature (20)..(21): internucleotide phosphorothioate linkage
  misc_feature (1)..(19): ribonucleotide unmodified or modified as described for this sequence
gugguacugagcaaaguagtt

SEQ ID NO: 1866 - DNA, 21 bp, Artificial Sequence
  Synthetic
  misc_feature (1)..(1): deoxy
  misc_feature (2)..(8): 2'-deoxy-2'-fluoro
  misc_feature (9)..(9): deoxy
  misc_feature (10)..(10): 2'-deoxy-2'-fluoro
  misc_feature (11)..(15): deoxy
  misc_feature (16)..(16): 2'-deoxy-2'-fluoro
  misc_feature (17)..(19): deoxy
  misc_feature (20)..(21): internucleotide phosphorothioate linkage
  misc_feature (1)..(19): ribonucleotide unmodified or modified as described for this sequence
acccucccacaaagacagatt

SEQ ID NO: 1867 - DNA, 21 bp, Artificial Sequence
  Synthetic
  misc_feature (1)..(2): deoxy
  misc_feature (3)..(3): 2'-deoxy-2'-fluoro
  misc_feature (4)..(4): deoxy
  misc_feature (5)..(5): 2'-deoxy-2'-fluoro
  misc_feature (6)..(6): deoxy
  misc_feature (7)..(7): 2'-deoxy-2'-fluoro
  misc_feature (8)..(12): deoxy
  misc_feature (13)..(14): 2'-deoxy-2'-fluoro
  misc_feature (15)..(16): deoxy
  misc_feature (17)..(18): 2'-deoxy-2'-fluoro
  misc_feature (19)..(19): deoxy
  misc_feature (20)..(21): internucleotide phosphorothioate linkage
  misc_feature (1)..(19): ribonucleotide unmodified or modified as described for this sequence
agugcacagaagccaguugtt

SEQ ID NO: 1868 - DNA, 21 bp, Artificial Sequence
  Synthetic
  misc_feature (1)..(4): deoxy
  misc_feature (5)..(5): 2'-deoxy-2'-fluoro
  misc_feature (6)..(6): deoxy
  misc_feature (7)..(7): 2'-deoxy-2'-fluoro
  misc_feature (8)..(8): deoxy
  misc_feature (9)..(13): 2'-deoxy-2'-fluoro
  misc_feature (14)..(14): deoxy
  misc_feature (15)..(18): 2'-deoxy-2'-fluoro
  misc_feature (19)..(19): deoxy
  misc_feature (20)..(21): internucleotide phosphorothioate linkage
  misc_feature (1)..(19): ribonucleotide unmodified or modified as described for this sequence
aaaacacauccucacucugtt

SEQ ID NO: 1869 - DNA, 21 bp, Artificial Sequence
  Synthetic
  misc_feature (1)..(2): 2'-deoxy-2'-fluoro
  misc_feature (3)..(4): deoxy
  misc_feature (5)..(6): 2'-deoxy-2'-fluoro
  misc_feature (7)..(10): deoxy
  misc_feature (11)..(11): 2'-deoxy-2'-fluoro
  misc_feature (12)..(13): deoxy
  misc_feature (14)..(14): 2'-deoxy-2'-fluoro
  misc_feature (15)..(15): deoxy
  misc_feature (16)..(16): 2'-deoxy-2'-fluoro
  misc_feature (17)..(19): deoxy
  misc_feature (20)..(21): internucleotide phosphorothioate linkage
  misc_feature (1)..(19): ribonucleotide unmodified or modified as described for this sequence
ucagcugaggugacaugggtt

SEQ ID NO: 1870 - DNA, 21 bp, Artificial Sequence
  Synthetic
  misc_feature (1)..(2): deoxy
  misc_feature (3)..(4): 2'-deoxy-2'-fluoro
  misc_feature (5)..(5): deoxy
  misc_feature (5)..(6): 2'-deoxy-2'-fluoro
  misc_feature (8)..(14): deoxy
  misc_feature (15)..(19): 2'-deoxy-2'-fluoro
  misc_feature (20)..(21): internucleotide phosphorothioate linkage
  misc_feature (1)..(19): ribonucleotide unmodified or modified as described for this sequence
agcugccaagaagacccuutt

SEQ ID NO: 1871 - DNA, 21 bp, Artificial Sequence
  Synthetic
  misc_feature (1)..(5): deoxy
  misc_feature (6)..(9): 2'-deoxy-2'-fluoro
  misc_feature (10)..(11): deoxy
  misc_feature (12)..(14): 2'-deoxy-2'-fluoro
  misc_feature (15)..(18): deoxy
  misc_feature (19)..(19): 2'-deoxy-2'-fluoro
  misc_feature (20)..(21): internucleotide phosphorothioate linkage
  misc_feature (1)..(19): ribonucleotide unmodified or modified as described for this sequence
aagagcuccagcuuagagutt

SEQ ID NO: 1872 - DNA, 21 bp, Artificial Sequence
  Synthetic
  misc_feature (1)..(2): deoxy
  misc_feature (3)..(3): 2'-deoxy-2'-fluoro
  misc_feature (4)..(4): deoxy
  misc_feature (5)..(5): 2'-deoxy-2'-fluoro
  misc_feature (6)..(7): deoxy
  misc_feature (8)..(9): 2'-deoxy-2'-fluoro
  misc_feature (10)..(11): deoxy
  misc_feature (12)..(13): 2'-deoxy-2'-fluoro
  misc_feature (14)..(14): deoxy
  misc_feature (15)..(15): 2'-deoxy-2'-fluoro
  misc_feature (16)..(17): deoxy
  misc_feature (18)..(19): 2'-deoxy-2'-fluoro
  misc_feature (20)..(21): internucleotide phosphorothioate linkage
  misc_feature (1)..(19): ribonucleotide unmodified or modified as described for this sequence
ggcauaacugauuacagcctt

SEQ ID NO: 1873 - DNA, 21 bp, Artificial Sequence
  Synthetic
  misc_feature (1)..(1): 5'-3 attached terminal deoxyabasic moiety
  misc_feature (1)..(2): 2'-deoxy-2'-fluoro
  misc_feature (3)..(3): 2'-O-methyl
  misc_feature (4)..(7): 2'-deoxy-2'-fluoro
  misc_feature (8)..(8): 2'-O-methyl
  misc_feature (9)..(11): 2'-deoxy-2'-fluoro
  misc_feature (12)..(13): 2'-O-methyl
  misc_feature (14)..(14): 2'-deoxy-2'-fluoro
  misc_feature (15)..(15): 2'-O-methyl
  misc_feature (16)..(17): 2'-deoxy-2'-fluoro
  misc_feature (18)..(18): 2'-O-methyl
  misc_feature (19)..(19): 2'-deoxy-2'-fluoro
  misc_feature (1)..(19): ribonucleotide unmodified or modified as described for this sequence
  misc_feature (21)..(21): 3'-3 attached terminal deoxyabasic moiety
cuacuuugcucaguaccactt

SEQ ID NO: 1874 - DNA, 21 bp, Artificial Sequence
  Synthetic
  misc_feature (1)..(1): 5'-3 attached terminal deoxyabasic moiety
  misc_feature (1)..(3): 2'-deoxy-2'-fluoro
  misc_feature (4)..(4): 2'-O-methyl
  misc_feature (5)..(9): 2'-deoxy-2'-fluoro
  misc_feature (10)..(10): 2'-O-methyl
  misc_feature (11)..(11): 2'-deoxy-2'-fluoro
  misc_feature (12)..(18): 2'-O-methyl
  misc_feature (19)..(19): 2'-deoxy-2'-fluoro
  misc_feature (1)..(19): ribonucleotide unmodified or modified as described for this sequence
  misc_feature (21)..(21): 3'-3 attached terminal deoxyabasic moiety
ucugucuuugugggagggutt

SEQ ID NO: 1875 - DNA, 21 bp, Artificial Sequence
  Synthetic
  misc_feature (1)..(1): 5'-3 attached terminal deoxyabasic moiety
  misc_feature (1)..(1): 2'-deoxy-2'-fluoro
  misc_feature (2)..(3): 2'-O-methyl
  misc_feature (4)..(5): 2'-deoxy-2'-fluoro
  misc_feature (6)..(7): 2'-O-methyl
  misc_feature (8)..(12): 2'-deoxy-2'-fluoro
  misc_feature (13)..(13): 2'-O-methyl
  misc_feature (14)..(14): 2'-deoxy-2'-fluoro
  misc_feature (15)..(15): 2'-O-methyl
  misc_feature (16)..(16): 2'-deoxy-2'-fluoro
  misc_feature (17)..(17): 2'-O-methyl
  misc_feature (18)..(19): 2'-deoxy-2'-fluoro
  misc_feature (1)..(19): ribonucleotide unmodified or modified as described for this sequence
  misc_feature (21)..(21): 3'-3 attached terminal deoxyabasic moiety
caacuggcuucugugcacutt

SEQ ID NO: 1876 - DNA, 21 bp, Artificial Sequence
  Synthetic
  misc_feature (1)..(1): 5'-3 attached terminal deoxyabasic moiety
  misc_feature (1)..(1): 2'-deoxy-2'-fluoro
  misc_feature (2)..(5): 2'-O-methyl
  misc_feature (6)..(6): 2'-deoxy-2'-fluoro
  misc_feature (7)..(11): 2'-O-methyl
  misc_feature (12)..(12): 2'-deoxy-2'-fluoro
  misc_feature (13)..(13): 2'-O-methyl
  misc_feature (14)..(14): 2'-deoxy-2'-fluoro
  misc_feature (15)..(15): 2'-O-methyl
  misc_feature (16)..(19): 2'-deoxy-2'-fluoro
  misc_feature (1)..(19): ribonucleotide unmodified or modified as described for this sequence
  misc_feature (21)..(21): 3'-3 attached terminal deoxyabasic moiety
cagagugaggauguguuuutt

SEQ ID NO: 1877 - DNA, 21 bp, Artificial Sequence
  Synthetic
  misc_feature (1)..(1): 5'-3 attached terminal deoxyabasic moiety
  misc_feature (1)..(3): 2'-deoxy-2'-fluoro
  misc_feature (4)..(4): 2'-O-methyl
  misc_feature (5)..(5): 2'-deoxy-2'-fluoro
  misc_feature (6)..(6): 2'-O-methyl
  misc_feature (7)..(8): 2'-deoxy-2'-fluoro
  misc_feature (9)..(9): 2'-O-methyl
  misc_feature (10)..(13): 2'-deoxy-2'-fluoro
  misc_feature (14)..(15): 2'-O-methyl
  misc_feature (16)..(17): 2'-deoxy-2'-fluoro
  misc_feature (18)..(19): 2'-O-methyl
  misc_feature (1)..(19): ribonucleotide unmodified or modified as described for this sequence
  misc_feature (21)..(21): 3'-3 attached terminal deoxyabasic moiety
cccaugucaccucagcugatt

SEQ ID NO: 1878 - DNA, 21 bp, Artificial Sequence
  Synthetic
  misc_feature (1)..(1): 5'-3 attached terminal deoxyabasic moiety
  misc_feature (1)..(5): 2'-O-methyl
  misc_feature (6)..(12): 2'-deoxy-2'-fluoro
  misc_feature (13)..(14): 2'-O-methyl
  misc_feature (15)..(15): 2'-deoxy-2'-fluoro
  misc_feature (16)..(17): 2'-O-methyl
  misc_feature (18)..(19): 2'-deoxy-2'-fluoro
  misc_feature (1)..(19): ribonucleotide unmodified or modified as described for this sequence
  misc_feature (21)..(21): 3'-3 attached terminal deoxyabasic moiety
aagggucuucuuggcagcutt

SEQ ID NO: 1879 - DNA, 21 bp, Artificial Sequence
  Synthetic
  misc_feature (1)..(1): 5'-3 attached terminal deoxyabasic moiety
  misc_feature (1)..(1): 2'-O-methyl
  misc_feature (2)..(5): 2'-deoxy-2'-fluoro
  misc_feature (6)..(8): 2'-O-methyl
  misc_feature (9)..(10): 2'-deoxy-2'-fluoro
  misc_feature (11)..(14): 2'-O-methyl
  misc_feature (15)..(19): 2'-deoxy-2'-fluoro
  misc_feature (1)..(19): ribonucleotide unmodified or modified as described for this sequence
  misc_feature (21)..(21): 3'-3 attached terminal deoxyabasic moiety
acucuaagcuggagcucuutt

SEQ ID NO: 1880 - DNA, 21 bp, Artificial Sequence
  Synthetic
  misc_feature (1)..(1): 5'-3 attached terminal deoxyabasic moiety
  misc_feature (1)..(2): 2'-O-methyl
  misc_feature (3)..(4): 2'-deoxy-'-fluoro
  misc_feature (5)..(5): 2'-O-methyl
  misc_feature (6)..(6): 2'-deoxy-'-fluoro
  misc_feature (7)..(8): 2'-O-methyl
  misc_feature (9)..(10): 2'-deoxy-'-fluoro
  misc_feature (11)..(12): 2'-O-methyl
  misc_feature (13)..(14): 2'-deoxy-'-fluoro
  misc_feature (15)..(15): 2'-O-methyl
  misc_feature (16)..(16): 2'-deoxy-'-fluoro
  misc_feature (17)..(17): 2'-O-methyl
  misc_feature (18)..(19): 2'-deoxy-'-fluoro
  misc_feature (1)..(19): ribonucleotide unmodified or modified as described for this sequence
  misc_feature (21)..(21): 3'-3 attached terminal deoxyabasic moiety
ggcuguaaucaguuaugcctt

SEQ ID NO: 1881 - DNA, 21 bp, Artificial Sequence
  Synthetic
  misc_feature (1)..(1): 2'-O-methyl
  misc_feature (2)..(2): 2'-deoxy-2'-fluoro
  misc_feature (3)..(4): 2'-O-methyl
  misc_feature (5)..(5): 2'-deoxy-2'-fluoro
  misc_feature (6)..(6): 2'-O-methyl
  misc_feature (7)..(8): 2'-deoxy-2'-fluoro
  misc_feature (9)..(11): 2'-O-methyl
  misc_feature (12)..(12): 2'-deoxy-2'-fluoro
  misc_feature (13)..(16): 2'-O-methyl
  misc_feature (17)..(17): 2'-deoxy-2'-fluoro
  misc_feature (18)..(19): 2'-O-methyl
  misc_feature (20)..(21): internucleotide phosphorothioate linkage
  misc_feature (1)..(19): ribonucleotide unmodified or modified as described for this sequence
gugguacugagcaaaguagtt

SEQ ID NO: 1882 - DNA, 21 bp, Artificial Sequence
  Synthetic
  misc_feature (1)..(1): 2'-O-methyl
  misc_feature (2)..(8): 2'-deoxy-2'-fluoro
  misc_feature (9)..(9): 2'-O-methyl
  misc_feature (10)..(10): 2'-deoxy-2'-fluoro
  misc_feature (11)..(15): 2'-O-methyl
  misc_feature (16)..(16): 2'-deoxy-2'-fluoro
  misc_feature (17)..(19): 2'-O-methyl
  misc_feature (20)..(21): internucleotide phosphorothioate linkage
  misc_feature (1)..(19): ribonucleotide unmodified or modified as described for this sequence
acccucccacaaagacagatt

SEQ ID NO: 1883 - DNA, 21 bp, Artificial Sequence
  Synthetic
  misc_feature (1)..(2): 2'-O-methyl
  misc_feature (3)..(3): 2'-deoxy-2'-fluoro
  misc_feature (4)..(4): 2'-O-methyl
  misc_feature (5)..(5): 2'-deoxy-2'-fluoro
  misc_feature (6)..(6): 2'-O-methyl
  misc_feature (7)..(7): 2'-deoxy-2'-fluoro
  misc_feature (8)..(12): 2'-O-methyl
  misc_feature (13)..(14): 2'-deoxy-2'-fluoro
  misc_feature (15)..(16): 2'-O-methyl
  misc_feature (17)..(18): 2'-deoxy-2'-fluoro
  misc_feature (19)..(19): 2'-O-methyl
  misc_feature (20)..(21): internucleotide phosphorothioate linkage
  misc_feature (1)..(19): ribonucleotide unmodified or modified as described for this sequence
agugcacagaagccaguugtt

SEQ ID NO: 1884 - DNA, 21 bp, Artificial Sequence
  Synthetic
  misc_feature (1)..(4): 2'-O-methyl
  misc_feature (5)..(5): 2'-deoxy-2'-fluoro
  misc_feature (6)..(6): 2'-O-methyl
  misc_feature (7)..(7): 2'-deoxy-2'-fluoro
  misc_feature (8)..(8): 2'-O-methyl
  misc_feature (9)..(13): 2'-deoxy-2'-fluoro
  misc_feature (14)..(14): 2'-O-methyl
  misc_feature (15)..(18): 2'-deoxy-2'-fluoro
  misc_feature (19)..(19): 2'-O-methyl
  misc_feature (20)..(21): internucleotide phosphorothioate linkage
  misc_feature (1)..(19): ribonucleotide unmodified or modified as described for this sequence
aaaacacauccucacucugtt

SEQ ID NO: 1885 - DNA, 21 bp, Artificial Sequence
  Synthetic
  misc_feature (1)..(2): 2'-deoxy-2'-fluoro
  misc_feature (3)..(4): 2'-O-methyl
  misc_feature (5)..(6): 2'-deoxy-2'-fluoro
  misc_feature (7)..(10): 2'-O-methyl
  misc_feature (11)..(11): 2'-deoxy-2'-fluoro
  misc_feature (12)..(13): 2'-O-methyl
  misc_feature (14)..(14): 2'-deoxy-2'-fluoro
  misc_feature (15)..(15): 2'-O-methyl
  misc_feature (16)..(16): 2'-deoxy-2'-fluoro
  misc_feature (17)..(19): 2'-O-methyl
  misc_feature (20)..(21): internucleotide phosphorothioate linkage
  misc_feature (1)..(19): ribonucleotide unmodified or modified as described for this sequence
ucagcugaggugacaugggtt

SEQ ID NO: 1886 - DNA, 21 bp, Artificial Sequence
  Synthetic
  misc_feature (1)..(2): 2'-O-methyl
  misc_feature (3)..(4): 2'-deoxy-2'-fluoro
  misc_feature (5)..(5): 2'-O-methyl
  misc_feature (6)..(7): 2'-deoxy-2'-fluoro
  misc_feature (8)..(14): 2'-O-methyl
  misc_feature (15)..(19): 2'-deoxy-2'-fluoro
  misc_feature (20)..(21): internucleotide phosphorothioate linkage
  misc_feature (1)..(19): ribonucleotide unmodified or modified as described for this sequence
agcugccaagaagacccuutt

SEQ ID NO: 1887 - DNA, 21 bp, Artificial Sequence
  Synthetic
  misc_feature (1)..(5): 2'-O-methyl
  misc_feature (6)..(9): 2'-deoxy-2'-fluoro
  misc_feature (10)..(11): 2'-O-methyl
  misc_feature (12)..(14): 2'-deoxy-2'-fluoro
  misc_feature (15)..(18): 2'-O-methyl
  misc_feature (19)..(19): 2'-deoxy-2'-fluoro
  misc_feature (20)..(21): internucleotide phosphorothioate linkage
  misc_feature (1)..(19): ribonucleotide unmodified or modified as described for this sequence
aagagcuccagcuuagagutt

SEQ ID NO: 1888 - DNA, 21 bp, Artificial Sequence
  Synthetic
  misc_feature (1)..(2): 2'-O-methyl
  misc_feature (3)..(3): 2'-deoxy-2'-fluoro
  misc_feature (4)..(4): 2'-O-methyl
  misc_feature (5)..(5): 2'-deoxy-2'-fluoro
  misc_feature (6)..(7): 2'-O-methyl
  misc_feature (8)..(9): 2'-deoxy-2'-fluoro
  misc_feature (10)..(11): 2'-O-methyl
  misc_feature (12)..(13): 2'-deoxy-2'-fluoro
  misc_feature (14)..(14): 2'-O-methyl
  misc_feature (15)..(15): 2'-deoxy-2'-fluoro
  misc_feature (16)..(17): 2'-O-methyl
  misc_feature (18)..(19): 2'-deoxy-2'-fluoro
  misc_feature (20)..(21): internucleotide phosphorothioate linkage
  misc_feature (1)..(19): ribonucleotide unmodified or modified as described for this sequence
ggcauaacugauuacagcctt

SEQ ID NO: 1889 - DNA, 21 bp, Artificial Sequence
  Synthetic
  misc_feature (1)..(1): 5'-3 attached terminal deoxyabasic moiety
  misc_feature (1)..(19): ribonucleotide unmodified or modified as described for this sequence
  misc_feature (21)..(21): 3'-3 attached terminal deoxyabasic moiety
cuacuuugcucaguaccactt

SEQ ID NO: 1890 - DNA, 21 bp, Artificial Sequence
  Synthetic
  misc_feature (1)..(1): 5'-3 attached terminal deoxyabasic moiety
  misc_feature (1)..(19): ribonucleotide unmodified or modified as described for this sequence
  misc_feature (21)..(21): 3'-3 attached terminal deoxyabasic moiety
ucugucuuugugggagggutt

SEQ ID NO: 1891 - DNA, 21 bp, Artificial Sequence
  Synthetic
  misc_feature (1)..(1): 5'-3 attached terminal deoxyabasic moiety
  misc_feature (1)..(19): ribonucleotide unmodified or modified as described for this sequence
  misc_feature (21)..(21): 3'-3 attached terminal deoxyabasic moiety
caacuggcuucugugcacutt

SEQ ID NO: 1892 - DNA, 21 bp, Artificial Sequence
  Synthetic
  misc_feature (1)..(1): 5'-3 attached terminal deoxyabasic moiety
  misc_feature (1)..(19): ribonucleotide unmodified or modified as described for this sequence
  misc_feature (21)..(21): 3'-3 attached terminal deoxyabasic moiety
cagagugaggauguguuuutt

SEQ ID NO: 1893 - DNA, 21 bp, Artificial Sequence
  Synthetic
  misc_feature (1)..(1): 5'-3 attached terminal deoxyabasic moiety
  misc_feature (1)..(19): ribonucleotide unmodified or modified as described for this sequence
  misc_feature (21)..(21): 3'-3 attached terminal deoxyabasic moiety
cccaugucaccucagcugatt

SEQ ID NO: 1894 - DNA, 21 bp, Artificial Sequence
  Synthetic
  misc_feature (1)..(1): 5'-3 attached terminal deoxyabasic moiety
  misc_feature (1)..(19): ribonucleotide unmodified or modified as described for this sequence
  misc_feature (21)..(21): 3'-3 attached terminal deoxyabasic moiety
aagggucuucuuggcagcutt

SEQ ID NO: 1895 - DNA, 21 bp, Artificial Sequence
  Synthetic
  misc_feature (1)..(1): 5'-3 attached terminal deoxyabasic moiety
  misc_feature (1)..(19): ribonucleotide unmodified or modified as described for this sequence
  misc_feature (21)..(21): 3'-3 attached terminal deoxyabasic moiety
acucuaagcuggagcucuutt

SEQ ID NO: 1896 - DNA, 21 bp, Artificial Sequence
  Synthetic
  misc_feature (1)..(1): 5'-3 attached terminal deoxyabasic moiety
  misc_feature (1)..(19): ribonucleotide unmodified or modified as described for this sequence
  misc_feature (21)..(21): 3'-3 attached terminal deoxyabasic moiety
ggcuguaaucaguuaugcctt

SEQ ID NO: 1897 - DNA, 21 bp, Artificial Sequence
  Synthetic
  misc_feature (20)..(21): internucleotide phosphorothioate linkage
  misc_feature (1)..(19): ribonucleotide unmodified or modified as described for this sequence
gugguacugagcaaaguagtt

SEQ ID NO: 1898 - DNA, 21 bp, Artificial Sequence
  Synthetic
  misc_feature (20)..(21): internucleotide phosphorothioate linkage
  misc_feature (1)..(19): ribonucleotide unmodified or modified as described for this sequence
acccucccacaaagacagatt

SEQ ID NO: 1899 - DNA, 21 bp, Artificial Sequence
  Synthetic
  misc_feature (20)..(21): internucleotide phosphorothioate linkage
  misc_feature (1)..(19): ribonucleotide unmodified or modified as described for this sequence
agugcacagaagccaguugtt

SEQ ID NO: 1900 - DNA, 21 bp, Artificial Sequence
  Synthetic
  misc_feature (20)..(21): internucleotide phosphorothioate linkage
  misc_feature (1)..(19): ribonucleotide unmodified or modified as described for this sequence
aaaacacauccucacucugtt

SEQ ID NO: 1901 - DNA, 21 bp, Artificial Sequence
  Synthetic
  misc_feature (20)..(21): internucleotide phosphorothioate linkage
  misc_feature (1)..(19): ribonucleotide unmodified or modified as described for this sequence
ucagcugaggugacaugggtt

SEQ ID NO: 1902 - DNA, 21 bp, Artificial Sequence
  Synthetic
  misc_feature (20)..(21): internucleotide phosphorothioate linkage
  misc_feature (1)..(19): ribonucleotide unmodified or modified as described for this sequence
agcugccaagaagacccuutt

SEQ ID NO: 1903 - DNA, 21 bp, Artificial Sequence
  Synthetic
  misc_feature (20)..(21): internucleotide phosphorothioate linkage
  misc_feature (1)..(19): ribonucleotide unmodified or modified as described for this sequence
aagagcuccagcuuagagutt

SEQ ID NO: 1904 - DNA, 21 bp, Artificial Sequence
  Synthetic
  misc_feature (20)..(21): internucleotide phosphorothioate linkage
  misc_feature (1)..(19): ribonucleotide unmodified or modified as described for this sequence
ggcauaacugauuacagcctt

SEQ ID NO: 1905 - DNA, 21 bp, Artificial Sequence
  Synthetic
  misc_feature (1)..(1): 2'-O-methyl
  misc_feature (2)..(2): 2'-deoxy-2'-fluoro
  misc_feature (3)..(4): 2'-O-methyl
  misc_feature (5)..(5): 2'-deoxy-2'-fluoro
  misc_feature (6)..(6): 2'-O-methyl
  misc_feature (9)..(11): 2'-O-methyl
  misc_feature (9)..(8): 2'-deoxy-2'-fluoro
  misc_feature (12)..(12): 2'-deoxy-2'-fluoro
  misc_feature (13)..(16): 2'-O-methyl
  misc_feature (17)..(17): 2'-deoxy-2'-fluoro
  misc_feature (18)..(19): 2'-O-methyl
  misc_feature (1)..(19): ribonucleotide unmodified or modified as described for this sequence
  misc_feature (21)..(21): 3'-3 attached terminal deoxyabasic moiety
gugguacugagcaaaguagtt

SEQ ID NO: 1906 - DNA, 21 bp, Artificial Sequence
  Synthetic
  misc_feature (1)..(1): 2'-O-methyl
  misc_feature (2)..(8): 2'-deoxy-2'-fluoro
  misc_feature (9)..(9): 2'-O-methyl
  misc_feature (10)..(10): 2'-deoxy-2'-fluoro
  misc_feature (11)..(15): 2'-O-methyl
  misc_feature (16)..(16): 2'-deoxy-2'-fluoro
  misc_feature (17)..(19): 2'-O-methyl
  misc_feature (1)..(19): ribonucleotide unmodified or modified as described for this sequence
  misc_feature (21)..(21): 5'-3 attached terminal deoxyabasic moiety
acccucccacaaagacagatt

SEQ ID NO: 1907 - DNA, 21 bp, Artificial Sequence
  Synthetic
  misc_feature (1)..(2): 2'-O-methyl
  misc_feature (3)..(3): 2'-deoxy-2'-fluoro
  misc_feature (4)..(4): 2'-O-methyl
  misc_feature (5)..(5): 2'-deoxy-2'-fluoro
  misc_feature (6)..(6): 2'-O-methyl
  misc_feature (7)..(7): 2'-deoxy-2'-fluoro
  misc_feature (8)..(12): 2'-O-methyl
  misc_feature (13)..(14): 2'-deoxy-2'-fluoro
  misc_feature (15)..(16): 2'-O-methyl
  misc_feature (17)..(18): 2'-deoxy-2'-fluoro
  misc_feature (19)..(19): 2'-O-methyl
  misc_feature (1)..(19): ribonucleotide unmodified or modified as described for this sequence
  misc_feature (21)..(21): 3'-3 attached terminal deoxyabasic moiety
agugcacagaagccaguugtt

SEQ ID NO: 1908 - DNA, 21 bp, Artificial Sequence
  Synthetic
  misc_feature (1)..(4): 2'-O-methyl
  misc_feature (5)..(5): 2'-deoxy-2'-fluoro
  misc_feature (6)..(6): 2'-O-methyl
  misc_feature (7)..(7): 2'-deoxy-2'-fluoro
  misc_feature (8)..(8): 2'-O-methyl
  misc_feature (9)..(13): 2'-deoxy-2'-fluoro
  misc_feature (14)..(14): 2'-O-methyl
  misc_feature (15)..(18): 2'-deoxy-2'-fluoro
  misc_feature (19)..(19): 2'-O-methyl
  misc_feature (1)..(19): ribonucleotide unmodified or modified as described for this sequence
  misc_feature (21)..(21): 3'-3 attached terminal deoxyabasic moiety
aaaacacauccucacucugtt

SEQ ID NO: 1909 - DNA, 21 bp, Artificial Sequence
  Synthetic
  misc_feature (1)..(2): 2'-deoxy-2'-fluoro
  misc_feature (3)..(4): 2'-O-methyl
  misc_feature (5)..(6): 2'-deoxy-2'-fluoro
  misc_feature (7)..(10): 2'-O-methyl
  misc_feature (11)..(11): 2'-deoxy-2'-fluoro
  misc_feature (12)..(13): 2'-O-methyl
  misc_feature (14)..(14): 2'-deoxy-2'-fluoro
  misc_feature (15)..(15): 2'-O-methyl
  misc_feature (16)..(16): 2'-deoxy-2'-fluoro
  misc_feature (17)..(19): 2'-O-methyl
  misc_feature (1)..(19): ribonucleotide unmodified or modified as described for this sequence
  misc_feature (21)..(21): 3'-3 attached terminal deoxyabasic moiety
ucagcugaggugacaugggtt

SEQ ID NO: 1910 - DNA, 21 bp, Artificial Sequence
  Synthetic
  misc_feature (1)..(2): 2'-O-methyl
  misc_feature (3)..(4): 2'-deoxy-2'-fluoro
  misc_feature (5)..(5): 2'-O-methyl
  misc_feature (6)..(7): 2'-deoxy-2'-fluoro
  misc_feature (8)..(14): 2'-O-methyl
  misc_feature (15)..(19): 2'-deoxy-2'-fluoro
  misc_feature (1)..(19): ribonucleotide unmodified or modified as described for this sequence
  misc_feature (21)..(21): 3'-3 attached terminal deoxyabasic moiety
agcugccaagaagacccuutt

SEQ ID NO: 1911 - DNA, 21 bp, Artificial Sequence
  Synthetic
  misc_feature (1)..(5): 2'-O-methyl
  misc_feature (6)..(9): 2'-deoxy-2'-fluoro
  misc_feature (10)..(11): 2'-O-methyl
  misc_feature (12)..(13): 2'-deoxy-2'-fluoro
  misc_feature (15)..(18): 2'-O-methyl
  misc_feature (19)..(19): 2'-deoxy-2'-fluoro
  misc_feature (1)..(19): ribonucleotide unmodified or modified as described for this sequence
  misc_feature (21)..(21): 3'-3 attached terminal deoxyabasic moiety
aagagcuccagcuuagagutt

SEQ ID NO: 1912 - DNA, 21 bp, Artificial Sequence
  Synthetic
  misc_feature (1)..(2): 2'-O-methyl
  misc_feature (3)..(3): 2'-deoxy-2'-fluoro
  misc_feature (4)..(4): 2'-O-methyl
  misc_feature (5)..(5): 2'-deoxy-2'-fluoro
  misc_feature (6)..(7): 2'-O-methyl
  misc_feature (8)..(9): 2'-deoxy-2'-fluoro
  misc_feature (10)..(11): 2'-O-methyl
  misc_feature (12)..(13): 2'-deoxy-2'-fluoro
  misc_feature (14)..(14): 2'-O-methyl
  misc_feature (15)..(15): 2'-deoxy-2'-fluoro
  misc_feature (16)..(17): 2'-O-methyl
  misc_feature (18)..(19): 2'-deoxy-2'-fluoro
  misc_feature (1)..(19): ribonucleotide unmodified or modified as described for this sequence
  misc_feature (21)..(21): 3'-3 attached terminal deoxyabasic moiety
ggcauaacugauuacagcctt

SEQ ID NO: 1913 - DNA, 21 bp, Artificial Sequence
  Synthetic
  misc_feature (1)..(19): ribonucleotide unmodified or modified as described for this sequence
  misc_feature (21)..(21): 3'-3 attached terminal deoxyabasic moiety
gugguacugagcaaaguagtt

SEQ ID NO: 1914 - DNA, 21 bp, Artificial Sequence
  Synthetic
  misc_feature (1)..(19): ribonucleotide unmodified or modified as described for this sequence
  misc_feature (21)..(21): 3'-3 attached terminal deoxyabasic moiety
acccucccacaaagacagatt

SEQ ID NO: 1915 - DNA, 21 bp, Artificial Sequence
  Synthetic
  misc_feature (1)..(19): ribonucleotide unmodified or modified as described for this sequence
  misc_feature (21)..(21): 3'-3 attached terminal deoxyabasic moiety
agugcacagaagccaguugtt

SEQ ID NO: 1916 - DNA, 21 bp, Artificial Sequence
  Synthetic
  misc_feature (1)..(19): ribonucleotide unmodified or modified as described for this sequence
  misc_feature (21)..(21): 3'-3 attached terminal deoxyabasic moiety
aaaacacauccucacucugtt

SEQ ID NO: 1917 - DNA, 21 bp, Artificial Sequence
  Synthetic
  misc_feature (1)..(19): ribonucleotide unmodified or modified as described for this sequence
  misc_feature (21)..(21): 3'-3 attached terminal deoxyabasic moiety
ucagcugaggugacaugggtt

SEQ ID NO: 1918 - DNA, 21 bp, Artificial Sequence
  Synthetic
  misc_feature (1)..(19): ribonucleotide unmodified or modified as described for this sequence
  misc_feature (21)..(21): 3'-3 attached terminal deoxyabasic moiety
agcugccaagaagacccuutt

SEQ ID NO: 1919 - DNA, 21 bp, Artificial Sequence
  Synthetic
  misc_feature (1)..(19): ribonucleotide unmodified or modified as described for this sequence
  misc_feature (21)..(21): 3'-3 attached terminal deoxyabasic moiety
aagagcuccagcuuagagutt

SEQ ID NO: 1920 - DNA, 21 bp, Artificial Sequence
  Synthetic
  misc_feature (1)..(19): ribonucleotide unmodified or modified as described for this sequence
  misc_feature (21)..(21): 3'-3 attached terminal deoxyabasic moiety
ggcauaacugauuacagcctt

SEQ ID NO: 1921 - DNA, 21 bp, Artificial Sequence
  Synthetic
  misc_feature (1)..(19): ribonucleotide unmodified or modified as described for this sequence
ugaccgcgacuuuucaaagtt

SEQ ID NO: 1922 - DNA, 21 bp, Artificial Sequence
  Synthetic
  misc_feature (1)..(19): ribonucleotide unmodified or modified as described for this sequence
aaccucagcaacuucaacctt

SEQ ID NO: 1923 - DNA, 21 bp, Artificial Sequence
  Synthetic
  misc_feature (1)..(19): ribonucleotide unmodified or modified as described for this sequence
accucagcaacuucaaccctt

SEQ ID NO: 1924 - DNA, 21 bp, Artificial Sequence
  Synthetic
  misc_feature (1)..(19): ribonucleotide unmodified or modified as described for this sequence
gaaaaagugaaaaccuugatt

SEQ ID NO: 1925 - DNA, 21 bp, Artificial Sequence
  Synthetic
  misc_feature (1)..(19): ribonucleotide unmodified or modified as described for this sequencee
aaaaagugaaaaccuugaatt

SEQ ID NO: 1926 - DNA, 21 bp, Artificial Sequence
  Synthetic
  misc_feature (1)..(19): ribonucleotide unmodified or modified as described for this sequence
cagggaacagguggcacagtt

SEQ ID NO: 1927 - DNA, 21 bp, Artificial Sequence
  Synthetic
  misc_feature (1)..(19): ribonucleotide unmodified or modified as described for this sequence
agaaagucaugaaccacgutt

SEQ ID NO: 1928 - DNA, 21 bp, Artificial Sequence
  Synthetic
  misc_feature (1)..(19): ribonucleotide unmodified or modified as described for this sequence
gaaagucaugaaccacguutt

SEQ ID NO: 1929 - DNA, 21 bp, Artificial Sequence
  Synthetic
  misc_feature (1)..(19): ribonucleotide unmodified or modified as described for this sequence
aagucaugaaccacguuaatt

SEQ ID NO: 1930 - DNA, 21 bp, Artificial Sequence
  Synthetic
  misc_feature (1)..(19): ribonucleotide unmodified or modified as described for this sequence
ucaugaaccacguuaacagtt

SEQ ID NO: 1931 - DNA, 21 bp, Artificial Sequence
  Synthetic
  misc_feature (1)..(19): ribonucleotide unmodified or modified as described for this sequence
agugggugccaacucaugctt

SEQ ID NO: 1932 - DNA, 21 bp, Artificial Sequence
  Synthetic
  misc_feature (1)..(19): ribonucleotide unmodified or modified as described for this sequence
ugccaacucaugcuaacgctt

SEQ ID NO: 1933 - DNA, 21 bp, Artificial Sequence
  Synthetic
  misc_feature (1)..(19): ribonucleotide unmodified or modified as described for this sequence
gccaacucaugcuaacgcatt

SEQ ID NO: 1934 - DNA, 21 bp, Artificial Sequence
  Synthetic
  misc_feature (1)..(19): ribonucleotide unmodified or modified as described for this sequence
caacucaugcuaacgcagctt

SEQ ID NO: 1935 - DNA, 21 bp, Artificial Sequence
  Synthetic
  misc_feature (1)..(19): ribonucleotide unmodified or modified as described for this sequence
aacucaugcuaacgcagcatt

SEQ ID NO: 1936 - DNA, 21 bp, Artificial Sequence
  Synthetic
  misc_feature (1)..(19): ribonucleotide unmodified or modified as described for this sequence
acucaugcuaacgcagcagtt

SEQ ID NO: 1937 - DNA, 21 bp, Artificial Sequence
  Synthetic
  misc_feature (1)..(19): ribonucleotide unmodified or modified as described for this sequence
cauugaccaagaacugcautt

SEQ ID NO: 1938 - DNA, 21 bp, Artificial Sequence
  Synthetic
  misc_feature (1)..(19): ribonucleotide unmodified or modified as described for this sequence
auugaccaagaacugcaugtt

SEQ ID NO: 1939 - DNA, 21 bp, Artificial Sequence
  Synthetic
  misc_feature (1)..(19): ribonucleotide unmodified or modified as described for this sequence
uugaccaagaacugcauggtt

SEQ ID NO: 1940 - DNA, 21 bp, Artificial Sequence
  Synthetic
  misc_feature (1)..(19): ribonucleotide unmodified or modified as described for this sequence
ugaccaagaacugcauggatt

SEQ ID NO: 1941 - DNA, 21 bp, Artificial Sequence
  Synthetic
  misc_feature (1)..(19): ribonucleotide unmodified or modified as described for this sequence
accaagaacugcauggacctt

SEQ ID NO: 1942 - DNA, 21 bp, Artificial Sequence
  Synthetic
  misc_feature (1)..(19): ribonucleotide unmodified or modified as described for this sequence
caagaacugcauggaccuatt

SEQ ID NO: 1943 - DNA, 21 bp, Artificial Sequence
  Synthetic
  misc_feature (1)..(19): ribonucleotide unmodified or modified as described for this sequence
agaacugcauggaccuaactt

SEQ ID NO: 1944 - DNA, 21 bp, Artificial Sequence
  Synthetic
  misc_feature (1)..(19): ribonucleotide unmodified or modified as described for this sequence
aacugcauggaccuaacautt

SEQ ID NO: 1945 - DNA, 21 bp, Artificial Sequence
  Synthetic
  misc_feature (1)..(19): ribonucleotide unmodified or modified as described for this sequence
acugcauggaccuaacauutt

SEQ ID NO: 1946 - DNA, 21 bp, Artificial Sequence
  Synthetic
  misc_feature (1)..(19): ribonucleotide unmodified or modified as described for this sequence
cugcauggaccuaacauuctt

SEQ ID NO: 1947 - DNA, 21 bp, Artificial Sequence
  Synthetic
  misc_feature (1)..(19): ribonucleotide unmodified or modified as described for this sequence
gcauggaccuaacauucgatt

SEQ ID NO: 1948 - DNA, 21 bp, Artificial Sequence
  Synthetic
  misc_feature (1)..(19): ribonucleotide unmodified or modified as described for this sequence
auggaccuaacauucgauctt

SEQ ID NO: 1949 - DNA, 21 bp, Artificial Sequence
  Synthetic
  misc_feature (1)..(19): ribonucleotide unmodified or modified as described for this sequence
cuuugaaaagucgcggucatt

SEQ ID NO: 1950 - DNA, 21 bp, Artificial Sequence
  Synthetic
  misc_feature (1)..(19): ribonucleotide unmodified or modified as described for this sequence
gguugaaguugcugagguutt

SEQ ID NO: 1951 - DNA, 21 bp, Artificial Sequence
  Synthetic
  misc_feature (1)..(19): ribonucleotide unmodified or modified as described for this sequence
ggguugaaguugcugaggutt

SEQ ID NO: 1952 - DNA, 21 bp, Artificial Sequence
  Synthetic
  misc_feature (1)..(19): ribonucleotide unmodified or modified as described for this sequence
ucaagguuuucacuuuuuctt

SEQ ID NO: 1953 - DNA, 21 bp, Artificial Sequence
  Synthetic
  misc_feature (1)..(19): ribonucleotide unmodified or modified as described for this sequence
uucaagguuuucacuuuuutt

SEQ ID NO: 1954 - DNA, 21 bp, Artificial Sequence
  Synthetic
  misc_feature (1)..(19): ribonucleotide unmodified or modified as described for this sequence
cugugccaccuguucccugtt

SEQ ID NO: 1955 - DNA, 21 bp, Artificial Sequence
  Synthetic
  misc_feature (1)..(19): ribonucleotide unmodified or modified as described for this sequence
acgugguucaugacuuucutt

SEQ ID NO: 1956 - DNA, 21 bp, Artificial Sequence
  Synthetic
  misc_feature (1)..(19): ribonucleotide unmodified or modified as described for this sequence
aacgugguucaugacuuuctt

SEQ ID NO: 1957 - DNA, 21 bp, Artificial Sequence
  Synthetic
  misc_feature (1)..(19): ribonucleotide unmodified or modified as described for this sequence
uuaacgugguucaugacuutt

SEQ ID NO: 1958 - DNA, 21 bp, Artificial Sequence
  Synthetic
  misc_feature (1)..(19): ribonucleotide unmodified or modified as described for this sequence
cuguuaacgugguucaugatt

SEQ ID NO: 1959 - DNA, 21 bp, Artificial Sequence
  Synthetic
  misc_feature (1)..(19): ribonucleotide unmodified or modified as described for this sequence
gcaugaguuggcacccacutt

SEQ ID NO: 1960 - DNA, 21 bp, Artificial Sequence
  Synthetic
  misc_feature (1)..(19): ribonucleotide unmodified or modified as described for this sequence
gcguuagcaugaguuggcatt

SEQ ID NO: 1961 - DNA, 21 bp, Artificial Sequence
  Synthetic
  misc_feature (1)..(19): ribonucleotide unmodified or modified as described for this sequence
ugcguuagcaugaguuggctt

SEQ ID NO: 1962 - DNA, 21 bp, Artificial Sequence
  Synthetic
  misc_feature (1)..(19): ribonucleotide unmodified or modified as described for this sequence
gcugcguuagcaugaguugtt

SEQ ID NO: 1963 - DNA, 21 bp, Artificial Sequence
  Synthetic
  misc_feature (1)..(19): ribonucleotide unmodified or modified as described for this sequence
ugcugcguuagcaugaguutt

SEQ ID NO: 1964 - DNA, 21 bp, Artificial Sequence
  Synthetic
  misc_feature (1)..(19): ribonucleotide unmodified or modified as described for this sequence
cugcugcguuagcaugagutt

SEQ ID NO: 1965 - DNA, 21 bp, Artificial Sequence
  Synthetic
  misc_feature (1)..(19): ribonucleotide unmodified or modified as described for this sequence
augcaguucuuggucaaugtt

SEQ ID NO: 1966 - DNA, 21 bp, Artificial Sequence
  Synthetic
  misc_feature (1)..(19): ribonucleotide unmodified or modified as described for this sequence
caugcaguucuuggucaautt

SEQ ID NO: 1967 - DNA, 21 bp, Artificial Sequence
  Synthetic
  misc_feature (1)..(19): ribonucleotide unmodified or modified as described for this sequence
ccaugcaguucuuggucaatt

SEQ ID NO: 1968 - DNA, 21 bp, Artificial Sequence
  Synthetic
  misc_feature (1)..(19): ribonucleotide unmodified or modified as described for this sequence
uccaugcaguucuuggucatt

SEQ ID NO: 1969 - DNA, 21 bp, Artificial Sequence
  Synthetic
  misc_feature (1)..(19): ribonucleotide unmodified or modified as described for this sequence
gguccaugcaguucuuggutt

SEQ ID NO: 1970 - DNA, 21 bp, Artificial Sequence
  Synthetic
  misc_feature (1)..(19): ribonucleotide unmodified or modified as described for this sequence
uagguccaugcaguucuugtt

SEQ ID NO: 1971 - DNA, 21 bp, Artificial Sequence
  Synthetic
  misc_feature (1)..(19): ribonucleotide unmodified or modified as described for this sequence
guuagguccaugcaguucutt

SEQ ID NO: 1972 - DNA, 21 bp, Artificial Sequence
  Synthetic
  misc_feature (1)..(19): ribonucleotide unmodified or modified as described for this sequence
auguuagguccaugcaguutt

SEQ ID NO: 1973 - DNA, 21 bp, Artificial Sequence
  Synthetic
  misc_feature (1)..(19): ribonucleotide unmodified or modified as described for this sequence
aauguuagguccaugcagutt

SEQ ID NO: 1974 - DNA, 21 bp, Artificial Sequence
  Synthetic
  misc_feature (1)..(19): ribonucleotide unmodified or modified as described for this sequence
gaauguuagguccaugcagtt

SEQ ID NO: 1975 - DNA, 21 bp, Artificial Sequence
  Synthetic
  misc_feature (1)..(19): ribonucleotide unmodified or modified as described for this sequence
ucgaauguuagguccaugctt

SEQ ID NO: 1976 - DNA, 21 bp, Artificial Sequence
  Synthetic
  misc_feature (1)..(19): ribonucleotide unmodified or modified as described for this sequence
gaucgaauguuagguccautt

SEQ ID NO: 1977 - DNA, 21 bp, Artificial Sequence
  Synthetic
  misc_feature (1)..(1): 5'-3 attached terminal deoxyabasic moiety
  misc_feature (1)..(1): 2'-deoxy-2'-fluoro
  misc_feature (4)..(5): 2'-deoxy-2'-fluoro
  misc_feature (7)..(7): 2'-deoxy-2'-fluoro
  misc_feature (10)..(15): 2'-deoxy-2'-fluoro
  misc_feature (1)..(19): ribonucleotide unmodified or modified as described for this sequence
  misc_feature (21)..(21): 3'-3 attached terminal deoxyabasic moiety
ugaccgcgacuuuucaaagtt

SEQ ID NO: 1978 - DNA, 21 bp, Artificial Sequence
  Synthetic
  misc_feature (1)..(1): 5'-3 attached terminal deoxyabasic moiety
  misc_feature (3)..(6): 2'-deoxy-2'-fluoro
  misc_feature (9)..(9): 2'-deoxy-2'-fluoro
  misc_feature (12)..(15): 2'-deoxy-2'-fluoro
  misc_feature (18)..(19): 2'-deoxy-2'-fluoro
  misc_feature (1)..(19): ribonucleotide unmodified or modified as described for this sequence
  misc_feature (21)..(21): 3'-3 attached terminal deoxyabasic moiety
aaccucagcaacuucaacctt

SEQ ID NO: 1979 - DNA, 21 bp, Artificial Sequence
  Synthetic
  misc_feature (1)..(1): 5'-3 attached terminal deoxyabasic moiety
  misc_feature (2)..(5): 2'-deoxy-2'-fluoro
  misc_feature (8)..(8): 2'-deoxy-2'-fluoro
  misc_feature (11)..(14): 2'-deoxy-2'-fluoro
  misc_feature (17)..(19): 2'-deoxy-2'-fluoro
  misc_feature (1)..(19): ribonucleotide unmodified or modified as described for this sequence
  misc_feature (21)..(21): 3'-3 attached terminal deoxyabasic moiety
accucagcaacuucaaccctt

SEQ ID NO: 1980 - DNA, 21 bp, Artificial Sequence
  Synthetic
  misc_feature (1)..(1): 5'-3 attached terminal deoxyabasic moiety
  misc_feature (8)..(8): 2'-deoxy-2'-fluoro
  misc_feature (14)..(17): 2'-deoxy-2'-fluoro
  misc_feature (1)..(19): ribonucleotide unmodified or modified as described for this sequence
  misc_feature (21)..(21): 3'-3 attached terminal deoxyabasic moiety
gaaaaagugaaaaccuugatt

SEQ ID NO: 1981 - DNA, 21 bp, Artificial Sequence
  Synthetic
  misc_feature (1)..(1): 5'-3 attached terminal deoxyabasic moiety
  misc_feature (7)..(7): 2'-deoxy-2'-fluoro
  misc_feature (13)..(16): 2'-deoxy-2'-fluoro
  misc_feature (1)..(19): ribonucleotide unmodified or modified as described for this sequence
  misc_feature (21)..(21): 3'-3 attached terminal deoxyabasic moiety
aaaaagugaaaaccuugaatt

SEQ ID NO: 1982 - DNA, 21 bp, Artificial Sequence
  Synthetic
  misc_feature (1)..(1): 5'-3 attached terminal deoxyabasic moiety
  misc_feature (1)..(1): 2'-deoxy-2'-fluoro
  misc_feature (8)..(8): 2'-deoxy-2'-fluoro
  misc_feature (12)..(12): 2'-deoxy-2'-fluoro
  misc_feature (15)..(15): 2'-deoxy-2'-fluoro
  misc_feature (17)..(17): 2'-deoxy-2'-fluoro
  misc_feature (1)..(19): ribonucleotide unmodified or modified as described for this sequence
  misc_feature (21)..(21): 3'-3 attached terminal deoxyabasic moiety
cagggaacagguggcacagtt

SEQ ID NO: 1983 - DNA, 21 bp, Artificial Sequence
  Synthetic
  misc_feature (1)..(1): 5'-3 attached terminal deoxyabasic moiety
  misc_feature (7)..(8): 2'-deoxy-2'-fluoro
  misc_feature (10)..(10): 2'-deoxy-2'-fluoro
  misc_feature (14)..(15): 2'-deoxy-2'-fluoro
  misc_feature (17)..(17): 2'-deoxy-2'-fluoro
  misc_feature (19)..(19): 2'-deoxy-2'-fluoro
  misc_feature (1)..(19): ribonucleotide unmodified or modified as described for this sequence
  misc_feature (21)..(21): 3'-3 attached terminal deoxyabasic moiety
agaaagucaugaaccacgutt

SEQ ID NO: 1984 - DNA, 21 bp, Artificial Sequence
  Synthetic
  misc_feature (1)..(1): 5'-3 attached terminal deoxyabasic moiety
  misc_feature (6)..(7): 2'-deoxy-2'-fluoro
  misc_feature (9)..(9): 2'-deoxy-2'-fluoro
  misc_feature (13)..(14): 2'-deoxy-2'-fluoro
  misc_feature (16)..(16): 2'-deoxy-2'-fluoro
  misc_feature (18)..(19): 2'-deoxy-2'-fluoro
  misc_feature (1)..(19): ribonucleotide unmodified or modified as described for this sequence
  misc_feature (21)..(21): 3'-3 attached terminal deoxyabasic moiety
gaaagucaugaaccacguutt

SEQ ID NO: 1985 - DNA, 21 bp, Artificial Sequence
  Synthetic
  misc_feature (1)..(1): 5'-3 attached terminal deoxyabasic moiety
  misc_feature (4)..(5): 2'-deoxy-2'-fluoro
  misc_feature (7)..(7): 2'-deoxy-2'-fluoro
  misc_feature (11)..(12): 2'-deoxy-2'-fluoro
  misc_feature (14)..(14): 2'-deoxy-2'-fluoro
  misc_feature (16)..(17): 2'-deoxy-2'-fluoro
  misc_feature (1)..(19): ribonucleotide unmodified or modified as described for this sequence
  misc_feature (21)..(21): 3'-3 attached terminal deoxyabasic moiety
aagucaugaaccacguuaatt

SEQ ID NO: 1986 - DNA, 21 bp, Artificial Sequence
  Synthetic
  misc_feature (1)..(1): 5'-3 attached terminal deoxyabasic moiety
  misc_feature (1)..(2): 2'-deoxy-2'-fluoro
  misc_feature (4)..(4): 2'-deoxy-2'-fluoro
  misc_feature (8)..(9): 2'-deoxy-2'-fluoro
  misc_feature (11)..(11): 2'-deoxy-2'-fluoro
  misc_feature (13)..(14): 2'-deoxy-2'-fluoro
  misc_feature (17)..(17): 2'-deoxy-2'-fluoro
  misc_feature (1)..(19): ribonucleotide unmodified or modified as described for this sequence
  misc_feature (21)..(21): 3'-3 attached terminal deoxyabasic moiety
ucaugaaccacguuaacagtt

SEQ ID NO: 1987 - DNA, 21 bp, Artificial Sequence
  Synthetic
  misc_feature (1)..(1): 5'-3 attached terminal deoxyabasic moiety
  misc_feature (3)..(3): 2'-deoxy-2'-fluoro
  misc_feature (7)..(7): 2'-deoxy-2'-fluoro
  misc_feature (9)..(10): 2'-deoxy-2'-fluoro
  misc_feature (13)..(15): 2'-deoxy-2'-fluoro
  misc_feature (17)..(17): 2'-deoxy-2'-fluoro
  misc_feature (19)..(19): 2'-deoxy-2'-fluoro
  misc_feature (1)..(19): ribonucleotide unmodified or modified as described for this sequence
  misc_feature (21)..(21): 3'-3 attached terminal deoxyabasic moiety
agugggugccaacucaugctt

SEQ ID NO: 1988 - DNA, 21 bp, Artificial Sequence
  Synthetic
  misc_feature (1)..(1): 5'-3 attached terminal deoxyabasic moiety
  misc_feature (1)..(1): 2'-deoxy-2'-fluoro
  misc_feature (3)..(4): 2'-deoxy-2'-fluoro
  misc_feature (7)..(9): 2'-deoxy-2'-fluoro
  misc_feature (11)..(11): 2'-deoxy-2'-fluoro
  misc_feature (13)..(14): 2'-deoxy-2'-fluoro
  misc_feature (17)..(17): 2'-deoxy-2'-fluoro
  misc_feature (19)..(19): 2'-deoxy-2'-fluoro
  misc_feature (1)..(19): ribonucleotide unmodified or modified as described for this sequence
  misc_feature (21)..(21): 3'-3 attached terminal deoxyabasic moiety
ugccaacucaugcuaacgctt

SEQ ID NO: 1989 - DNA, 21 bp, Artificial Sequence
  Synthetic
  misc_feature (1)..(1): 5'-3 attached terminal deoxyabasic moiety
  misc_feature (2)..(3): 2'-deoxy-2'-fluoro
  misc_feature (6)..(8): 2'-deoxy-2'-fluoro
  misc_feature (10)..(10): 2'-deoxy-2'-fluoro
  misc_feature (12)..(13): 2'-deoxy-2'-fluoro
  misc_feature (16)..(16): 2'-deoxy-2'-fluoro
  misc_feature (18)..(18): 2'-deoxy-2'-fluoro
  misc_feature (1)..(19): ribonucleotide unmodified or modified as described for this sequence
  misc_feature (21)..(21): 3'-3 attached terminal deoxyabasic moiety
gccaacucaugcuaacgcatt

SEQ ID NO: 1990 - DNA, 21 bp, Artificial Sequence
  Synthetic
  misc_feature (1)..(1): 5'-3 attached terminal deoxyabasic moiety
  misc_feature (1)..(1): 2'-deoxy-2'-fluoro
  misc_feature (4)..(6): 2'-deoxy-2'-fluoro
  misc_feature (8)..(8): 2'-deoxy-2'-fluoro
  misc_feature (10)..(11): 2'-deoxy-2'-fluoro
  misc_feature (14)..(14): 2'-deoxy-2'-fluoro
  misc_feature (16)..(16): 2'-deoxy-2'-fluoro
  misc_feature (19)..(19): 2'-deoxy-2'-fluoro
  misc_feature (1)..(19): ribonucleotide unmodified or modified as described for this sequence
  misc_feature (21)..(21): 3'-3 attached terminal deoxyabasic moiety
caacucaugcuaacgcagctt

SEQ ID NO: 1991 - DNA, 21 bp, Artificial Sequence
  Synthetic
  misc_feature (1)..(1): 5'-3 attached terminal deoxyabasic moiety
  misc_feature (3)..(5): 2'-deoxy-2'-fluoro
  misc_feature (7)..(7): 2'-deoxy-2'-fluoro
  misc_feature (9)..(10): 2'-deoxy-2'-fluoro
  misc_feature (13)..(13): 2'-deoxy-2'-fluoro
  misc_feature (15)..(15): 2'-deoxy-2'-fluoro
  misc_feature (18)..(18): 2'-deoxy-2'-fluoro
  misc_feature (1)..(19): ribonucleotide unmodified or modified as described for this sequence
  misc_feature (21)..(21): 3'-3 attached terminal deoxyabasic moiety
aacucaugcuaacgcagcatt

SEQ ID NO: 1992 - DNA, 21 bp, Artificial Sequence
  Synthetic
  misc_feature (1)..(1): 5'-3 attached terminal deoxyabasic moiety
  misc_feature (2)..(4): 2'-deoxy-2'-fluoro
  misc_feature (6)..(6): 2'-deoxy-2'-fluoro
  misc_feature (8)..(9): 2'-deoxy-2'-fluoro
  misc_feature (12)..(12): 2'-deoxy-2'-fluoro
  misc_feature (14)..(14): 2'-deoxy-2'-fluoro
  misc_feature (17)..(17): 2'-deoxy-2'-fluoro
  misc_feature (1)..(19): ribonucleotide unmodified or modified as described for this sequence
  misc_feature (21)..(21): 3'-3 attached terminal deoxyabasic moiety
acucaugcuaacgcagcagtt

SEQ ID NO: 1993 - DNA, 21 bp, Artificial Sequence
  Synthetic
  misc_feature (1)..(1): 5'-3 attached terminal deoxyabasic moiety
  misc_feature (1)..(1): 2'-deoxy-2'-fluoro
  misc_feature (3)..(4): 2'-deoxy-2'-fluoro
  misc_feature (7)..(8): 2'-deoxy-2'-fluoro
  misc_feature (14)..(15): 2'-deoxy-2'-fluoro
  misc_feature (17)..(17): 2'-deoxy-2'-fluoro
  misc_feature (19)..(19): 2'-deoxy-2'-fluoro
  misc_feature (1)..(19): ribonucleotide unmodified or modified as described for this sequence
  misc_feature (21)..(21): 3'-3 attached terminal deoxyabasic moiety
cauugaccaagaacugcautt

SEQ ID NO: 1994 - DNA, 21 bp, Artificial Sequence
  Synthetic
  misc_feature (1)..(1): 5'-3 attached terminal deoxyabasic moiety
  misc_feature (2)..(3): 2'-deoxy-2'-fluoro
  misc_feature (6)..(7): 2'-deoxy-2'-fluoro
  misc_feature (13)..(14): 2'-deoxy-2'-fluoro
  misc_feature (16)..(16): 2'-deoxy-2'-fluoro
  misc_feature (18)..(18): 2'-deoxy-2'-fluoro
  misc_feature (1)..(19): ribonucleotide unmodified or modified as described for this sequence
  misc_feature (21)..(21): 3'-3 attached terminal deoxyabasic moiety
auugaccaagaacugcaugtt

SEQ ID NO: 1995 - DNA, 21 bp, Artificial Sequence
  Synthetic
  misc_feature (1)..(1): 5'-3 attached terminal deoxyabasic moiety
  misc_feature (1)..(2): 2'-deoxy-2'-fluoro
  misc_feature (5)..(6): 2'-deoxy-2'-fluoro
  misc_feature (12)..(13): 2'-deoxy-2'-fluoro
  misc_feature (15)..(15): 2'-deoxy-2'-fluoro
  misc_feature (17)..(17): 2'-deoxy-2'-fluoro
  misc_feature (1)..(19): ribonucleotide unmodified or modified as described for this sequence
  misc_feature (21)..(21): 3'-3 attached terminal deoxyabasic moiety
uugaccaagaacugcauggtt

SEQ ID NO: 1996 - DNA, 21 bp, Artificial Sequence
  Synthetic
  misc_feature (1)..(1): 5'-3 attached terminal deoxyabasic moiety
  misc_feature (1)..(1): 2'-deoxy-2'-fluoro
  misc_feature (4)..(5): 2'-deoxy-2'-fluoro
  misc_feature (11)..(12): 2'-deoxy-2'-fluoro
  misc_feature (14)..(14): 2'-deoxy-2'-fluoro
  misc_feature (16)..(16): 2'-deoxy-2'-fluoro
  misc_feature (1)..(19): ribonucleotide unmodified or modified as described for this sequence
  misc_feature (21)..(21): 3'-3 attached terminal deoxyabasic moiety
ugaccaagaacugcauggatt

SEQ ID NO: 1997 - DNA, 21 bp, Artificial Sequence
  Synthetic
  misc_feature (1)..(1): 5'-3 attached terminal deoxyabasic moiety
  misc_feature (2)..(3): 2'-deoxy-2'-fluoro
  misc_feature (9)..(10): 2'-deoxy-2'-fluoro
  misc_feature (12)..(12): 2'-deoxy-2'-fluoro
  misc_feature (14)..(14): 2'-deoxy-2'-fluoro
  misc_feature (18)..(19): 2'-deoxy-2'-fluoro
  misc_feature (1)..(19): ribonucleotide unmodified or modified as described for this sequence
  misc_feature (21)..(21): 3'-3 attached terminal deoxyabasic moiety
accaagaacugcauggacctt

SEQ ID NO: 1998 - DNA, 21 bp, Artificial Sequence
  Synthetic
  misc_feature (1)..(1): 5'-3 attached terminal deoxyabasic moiety
  misc_feature (1)..(1): 2'-deoxy-2'-fluoro
  misc_feature (7)..(8): 2'-deoxy-2'-fluoro
  misc_feature (10)..(10): 2'-deoxy-2'-fluoro
  misc_feature (12)..(12): 2'-deoxy-2'-fluoro
  misc_feature (16)..(18): 2'-deoxy-2'-fluoro
  misc_feature (1)..(19): ribonucleotide unmodified or modified as described for this sequence
  misc_feature (21)..(21): 3'-3 attached terminal deoxyabasic moiety
caagaacugcauggaccuatt

SEQ ID NO: 1999 - DNA, 21 bp, Artificial Sequence
  Synthetic
  misc_feature (1)..(1): 5'-3 attached terminal deoxyabasic moiety
  misc_feature (5)..(6): 2'-deoxy-2'-fluoro
  misc_feature (8)..(8): 2'-deoxy-2'-fluoro
  misc_feature (10)..(10): 2'-deoxy-2'-fluoro
  misc_feature (14)..(16): 2'-deoxy-2'-fluoro
  misc_feature (19)..(19): 2'-deoxy-2'-fluoro
  misc_feature (1)..(19): ribonucleotide unmodified or modified as described for this sequence
  misc_feature (21)..(21): 3'-3 attached terminal deoxyabasic moiety
agaacugcauggaccuaactt

SEQ ID NO: 2000 - DNA, 21 bp, Artificial Sequence
  Synthetic
  misc_feature (1)..(1): 5'-3 attached terminal deoxyabasic moiety
  misc_feature (3)..(4): 2'-deoxy-2'-fluoro
  misc_feature (6)..(6): 2'-deoxy-2'-fluoro
  misc_feature (8)..(8): 2'-deoxy-2'-fluoro
  misc_feature (12)..(14): 2'-deoxy-2'-fluoro
  misc_feature (17)..(17): 2'-deoxy-2'-fluoro
  misc_feature (19)..(19): 2'-deoxy-2'-fluoro
  misc_feature (1)..(19): ribonucleotide unmodified or modified as described for this sequence
  misc_feature (21)..(21): 3'-3 attached terminal deoxyabasic moiety
aacugcauggaccuaacautt

SEQ ID NO: 2001 - DNA, 21 bp, Artificial Sequence
  Synthetic
  misc_feature (1)..(1): 5'-3 attached terminal deoxyabasic moiety
  misc_feature (2)..(3): 2'-deoxy-2'-fluoro
  misc_feature (5)..(5): 2'-deoxy-2'-fluoro
  misc_feature (7)..(7): 2'-deoxy-2'-fluoro
  misc_feature (11)..(13): 2'-deoxy-2'-fluoro
  misc_feature (16)..(16): 2'-deoxy-2'-fluoro
  misc_feature (18)..(19): 2'-deoxy-2'-fluoro
  misc_feature (1)..(19): ribonucleotide unmodified or modified as described for this sequence
  misc_feature (21)..(21): 3'-3 attached terminal deoxyabasic moiety
acugcauggaccuaacauutt

SEQ ID NO: 2002 - DNA, 21 bp, Artificial Sequence
  Synthetic
  misc_feature (1)..(1): 5'-3 attached terminal deoxyabasic moiety
  misc_feature (1)..(2): 2'-deoxy-2'-fluoro
  misc_feature (4)..(4): 2'-deoxy-2'-fluoro
  misc_feature (6)..(6): 2'-deoxy-2'-fluoro
  misc_feature (10)..(12): 2'-deoxy-2'-fluoro
  misc_feature (15)..(15): 2'-deoxy-2'-fluoro
  misc_feature (17)..(19): 2'-deoxy-2'-fluoro
  misc_feature (1)..(19): ribonucleotide unmodified or modified as described for this sequence
  misc_feature (21)..(21): 3'-3 attached terminal deoxyabasic moiety
cugcauggaccuaacauuctt

SEQ ID NO: 2003 - DNA, 21 bp, Artificial Sequence
  Synthetic
  misc_feature (1)..(1): 5'-3 attached terminal deoxyabasic moiety
  misc_feature (2)..(2): 2'-deoxy-2'-fluoro
  misc_feature (4)..(4): 2'-deoxy-2'-fluoro
  misc_feature (8)..(10): 2'-deoxy-2'-fluoro
  misc_feature (13)..(13): 2'-deoxy-2'-fluoro
  misc_feature (15)..(17): 2'-deoxy-2'-fluoro
  misc_feature (1)..(19): ribonucleotide unmodified or modified as described for this sequence
  misc_feature (21)..(21): 3'-3 attached terminal deoxyabasic moiety
gcauggaccuaacauucgatt

SEQ ID NO: 2004 - DNA, 21 bp, Artificial Sequence
  Synthetic
  misc_feature (1)..(1): 5'-3 attached terminal deoxyabasic moiety
  misc_feature (2)..(2): 2'-deoxy-2'-fluoro
  misc_feature (6)..(8): 2'-deoxy-2'-fluoro
  misc_feature (11)..(11): 2'-deoxy-2'-fluoro
  misc_feature (13)..(15): 2'-deoxy-2'-fluoro
  misc_feature (18)..(19): 2'-deoxy-2'-fluoro
  misc_feature (1)..(19): ribonucleotide unmodified or modified as described for this sequence
  misc_feature (21)..(21): 3'-3 attached terminal deoxyabasic moiety
auggaccuaacauucgauctt

SEQ ID NO: 2005 - DNA, 21 bp, Artificial Sequence
  Synthetic
  misc_feature (1)..(4): 2'-deoxy-2'-fluoro
  misc_feature (11)..(12): 2'-deoxy-2'-fluoro
  misc_feature (14)..(14): 2'-deoxy-2'-fluoro
  misc_feature (17)..(18): 2'-deoxy-2'-fluoro
  misc_feature (20)..(21): internucleotide phosphorothioate linkage
  misc_feature (1)..(19): ribonucleotide unmodified or modified as described for this sequence
cuuugaaaagucgcggucatt

SEQ ID NO: 2006 - DNA, 21 bp, Artificial Sequence
  Synthetic
  misc_feature (3)..(4): 2'-deoxy-2'-fluoro
  misc_feature (9)..(10): 2'-deoxy-2'-fluoro
  misc_feature (12)..(13): 2'-deoxy-2'-fluoro
  misc_feature (18)..(19): 2'-deoxy-2'-fluoro
  misc_feature (20)..(21): internucleotide phosphorothioate linkage
  misc_feature (1)..(19): ribonucleotide unmodified or modified as described for this sequence
gguugaaguugcugagguutt

SEQ ID NO: 2007 - DNA, 21 bp, Artificial Sequence
  Synthetic
  misc_feature (4)..(5): 2'-deoxy-2'-fluoro
  misc_feature (10)..(11): 2'-deoxy-2'-fluoro
  misc_feature (13)..(14): 2'-deoxy-2'-fluoro
  misc_feature (19)..(19): 2'-deoxy-2'-fluoro
  misc_feature (20)..(21): internucleotide phosphorothioate linkage
  misc_feature (1)..(19): ribonucleotide unmodified or modified as described for this sequence
ggguugaaguugcugaggutt

SEQ ID NO: 2008 - DNA, 21 bp, Artificial Sequence
  Synthetic
  misc_feature (1)..(2): 2'-deoxy-2'-fluoro
  misc_feature (7)..(11): 2'-deoxy-2'-fluoro
  misc_feature (13)..(19): 2'-deoxy-2'-fluoro
  misc_feature (20)..(21): internucleotide phosphorothioate linkage
  misc_feature (1)..(19): ribonucleotide unmodified or modified as described for this sequence
ucaagguuuucacuuuuuctt

SEQ ID NO: 2009 - DNA, 21 bp, Artificial Sequence
  Synthetic
  misc_feature (1)..(3): 2'-deoxy-2'-fluoro
  misc_feature (8)..(12): 2'-deoxy-2'-fluoro
  misc_feature (14)..(19): 2'-deoxy-2'-fluoro
  misc_feature (20)..(21): internucleotide phosphorothioate linkage
  misc_feature (1)..(19): ribonucleotide unmodified or modified as described for this sequence
uucaagguuuucacuuuuutt

SEQ ID NO: 2010 - DNA, 21 bp, Artificial Sequence
  Synthetic
  misc_feature (1)..(2): 2'-deoxy-2'-fluoro
  misc_feature (4)..(4): 2'-deoxy-2'-fluoro
  misc_feature (6)..(7): 2'-deoxy-2'-fluoro
  misc_feature (9)..(11): 2'-deoxy-2'-fluoro
  misc_feature (13)..(18): 2'-deoxy-2'-fluoro
  misc_feature (20)..(21): internucleotide phosphorothioate linkage
  misc_feature (1)..(19): ribonucleotide unmodified or modified as described for this sequence
cugugccaccuguucccugtt

SEQ ID NO: 2011 - DNA, 21 bp, Artificial Sequence
  Synthetic
  misc_feature (2)..(2): 2'-deoxy-2'-fluoro
  misc_feature (4)..(4): 2'-deoxy-2'-fluoro
  misc_feature (7)..(9): 2'-deoxy-2'-fluoro
  misc_feature (11)..(11): 2'-deoxy-2'-fluoro
  misc_feature (14)..(19): 2'-deoxy-2'-fluoro
  misc_feature (20)..(21): internucleotide phosphorothioate linkage
  misc_feature (1)..(19): ribonucleotide unmodified or modified as described for this sequence
acgugguucaugacuuucutt

SEQ ID NO: 2012 - DNA, 21 bp, Artificial Sequence
  Synthetic
  misc_feature (3)..(3): 2'-deoxy-2'-fluoro
  misc_feature (5)..(5): 2'-deoxy-2'-fluoro
  misc_feature (8)..(10): 2'-deoxy-2'-fluoro
  misc_feature (12)..(12): 2'-deoxy-2'-fluoro
  misc_feature (15)..(19): 2'-deoxy-2'-fluoro
  misc_feature (20)..(21): internucleotide phosphorothioate linkage
  misc_feature (1)..(19): ribonucleotide unmodified or modified as described for this sequence
aacgugguucaugacuuuctt

SEQ ID NO: 2013 - DNA, 21 bp, Artificial Sequence
  Synthetic
  misc_feature (1)..(2): 2'-deoxy-2'-fluoro
  misc_feature (5)..(5): 2'-deoxy-2'-fluoro
  misc_feature (7)..(7): 2'-deoxy-2'-fluoro
  misc_feature (10)..(12): 2'-deoxy-2'-fluoro
  misc_feature (14)..(14): 2'-deoxy-2'-fluoro
  misc_feature (17)..(19): 2'-deoxy-2'-fluoro
  misc_feature (20)..(21): internucleotide phosphorothioate linkage
  misc_feature (1)..(19): ribonucleotide unmodified or modified as described for this sequence
uuaacgugguucaugacuutt

SEQ ID NO: 2014 - DNA, 21 bp, Artificial Sequence
  Synthetic
  misc_feature (1)..(2): 2'-deoxy-2'-fluoro
  misc_feature (4)..(5): 2'-deoxy-2'-fluoro
  misc_feature (8)..(8): 2'-deoxy-2'-fluoro
  misc_feature (10)..(10): 2'-deoxy-2'-fluoro
  misc_feature (13)..(15): 2'-deoxy-2'-fluoro
  misc_feature (17)..(17): 2'-deoxy-2'-fluoro
  misc_feature (20)..(21): internucleotide phosphorothioate linkage
  misc_feature (1)..(19): ribonucleotide unmodified or modified as described for this sequence
cuguuaacgugguucaugatt

SEQ ID NO: 2015 - DNA, 21 bp, Artificial Sequence
  Synthetic
  misc_feature (2)..(2): 2'-deoxy-2'-fluoro
  misc_feature (4)..(4): 2'-deoxy-2'-fluoro
  misc_feature (8)..(9): 2'-deoxy-2'-fluoro
  misc_feature (12)..(12): 2'-deoxy-2'-fluoro
  misc_feature (14)..(16): 2'-deoxy-2'-fluoro
  misc_feature (18)..(19): 2'-deoxy-2'-fluoro
  misc_feature (20)..(21): internucleotide phosphorothioate linkage
  misc_feature (1)..(19): ribonucleotide unmodified or modified as described for this sequence
gcaugaguuggcacccacutt

SEQ ID NO: 2016 - DNA, 21 bp, Artificial Sequence
  Synthetic
  misc_feature (2)..(2): 2'-deoxy-2'-fluoro
  misc_feature (4)..(5): 2'-deoxy-2'-fluoro
  misc_feature (8)..(8): 2'-deoxy-2'-fluoro
  misc_feature (10)..(10): 2'-deoxy-2'-fluoro
  misc_feature (14)..(15): 2'-deoxy-2'-fluoro
  misc_feature (18)..(18): 2'-deoxy-2'-fluoro
  misc_feature (20)..(21): internucleotide phosphorothioate linkage
  misc_feature (1)..(19): ribonucleotide unmodified or modified as described for this sequence
gcguuagcaugaguuggcatt

SEQ ID NO: 2017 - DNA, 21 bp, Artificial Sequence
  Synthetic
  misc_feature (1)..(1): 2'-deoxy-2'-fluoro
  misc_feature (3)..(3): 2'-deoxy-2'-fluoro
  misc_feature (5)..(6): 2'-deoxy-2'-fluoro
  misc_feature (9)..(9): 2'-deoxy-2'-fluoro
  misc_feature (11)..(11): 2'-deoxy-2'-fluoro
  misc_feature (15)..(16): 2'-deoxy-2'-fluoro
  misc_feature (19)..(19): 2'-deoxy-2'-fluoro
  misc_feature (20)..(21): internucleotide phosphorothioate linkage
  misc_feature (1)..(19): ribonucleotide unmodified or modified as described for this sequence
ugcguuagcaugaguuggctt

SEQ ID NO: 2018 - DNA, 21 bp, Artificial Sequence
  Synthetic
  misc_feature (2)..(3): 2'-deoxy-2'-fluoro
  misc_feature (5)..(5): 2'-deoxy-2'-fluoro
  misc_feature (7)..(8): 2'-deoxy-2'-fluoro
  misc_feature (11)..(11): 2'-deoxy-2'-fluoro
  misc_feature (13)..(13): 2'-deoxy-2'-fluoro
  misc_feature (17)..(18): 2'-deoxy-2'-fluoro
  misc_feature (20)..(21): internucleotide phosphorothioate linkage
  misc_feature (1)..(19): ribonucleotide unmodified or modified as described for this sequence
gcugcguuagcaugaguugtt

SEQ ID NO: 2019 - DNA, 21 bp, Artificial Sequence
  Synthetic
  misc_feature (1)..(1): 2'-deoxy-2'-fluoro
  misc_feature (3)..(4): 2'-deoxy-2'-fluoro
  misc_feature (6)..(6): 2'-deoxy-2'-fluoro
  misc_feature (8)..(9): 2'-deoxy-2'-fluoro
  misc_feature (12)..(12): 2'-deoxy-2'-fluoro
  misc_feature (14)..(14): 2'-deoxy-2'-fluoro
  misc_feature (18)..(19): 2'-deoxy-2'-fluoro
  misc_feature (20)..(21): internucleotide phosphorothioate linkage
  misc_feature (1)..(19): ribonucleotide unmodified or modified as described for this sequence
ugcugcguuagcaugaguutt

SEQ ID NO: 2020 - DNA, 21 bp, Artificial Sequence
  Synthetic
  misc_feature (1)..(2): 2'-deoxy-2'-fluoro
  misc_feature (4)..(5): 2'-deoxy-2'-fluoro
  misc_feature (7)..(7): 2'-deoxy-2'-fluoro
  misc_feature (9)..(10): 2'-deoxy-2'-fluoro
  misc_feature (13)..(13): 2'-deoxy-2'-fluoro
  misc_feature (15)..(15): 2'-deoxy-2'-fluoro
  misc_feature (19)..(19): 2'-deoxy-2'-fluoro
  misc_feature (20)..(21): internucleotide phosphorothioate linkage
  misc_feature (1)..(19): ribonucleotide unmodified or modified as described for this sequence
cugcugcguuagcaugagutt

SEQ ID NO: 2021 - DNA, 21 bp, Artificial Sequence
  Synthetic
  misc_feature (2)..(2): 2'-deoxy-2'-fluoro
  misc_feature (4)..(4): 2'-deoxy-2'-fluoro
  misc_feature (7)..(11): 2'-deoxy-2'-fluoro
  misc_feature (14)..(15): 2'-deoxy-2'-fluoro
  misc_feature (18)..(18): 2'-deoxy-2'-fluoro
  misc_feature (20)..(21): internucleotide phosphorothioate linkage
  misc_feature (1)..(19): ribonucleotide unmodified or modified as described for this sequence
augcaguucuuggucaaugtt

SEQ ID NO: 2022 - DNA, 21 bp, Artificial Sequence
  Synthetic
  misc_feature (1)..(1): 2'-deoxy-2'-fluoro
  misc_feature (3)..(3): 2'-deoxy-2'-fluoro
  misc_feature (5)..(5): 2'-deoxy-2'-fluoro
  misc_feature (8)..(12): 2'-deoxy-2'-fluoro
  misc_feature (15)..(16): 2'-deoxy-2'-fluoro
  misc_feature (19)..(19): 2'-deoxy-2'-fluoro
  misc_feature (20)..(21): internucleotide phosphorothioate linkage
  misc_feature (1)..(19): ribonucleotide unmodified or modified as described for this sequence
caugcaguucuuggucaautt

SEQ ID NO: 2023 - DNA, 21 bp, Artificial Sequence
  Synthetic
  misc_feature (1)..(2): 2'-deoxy-2'-fluoro
  misc_feature (4)..(4): 2'-deoxy-2'-fluoro
  misc_feature (6)..(6): 2'-deoxy-2'-fluoro
  misc_feature (9)..(13): 2'-deoxy-2'-fluoro
  misc_feature (16)..(17): 2'-deoxy-2'-fluoro
  misc_feature (20)..(21): internucleotide phosphorothioate linkage
  misc_feature (1)..(19): ribonucleotide unmodified or modified as described for this sequence
ccaugcaguucuuggucaatt

SEQ ID NO: 2024 - DNA, 21 bp, Artificial Sequence
  Synthetic
  misc_feature (1)..(3): 2'-deoxy-2'-fluoro
  misc_feature (5)..(5): 2'-deoxy-2'-fluoro
  misc_feature (7)..(7): 2'-deoxy-2'-fluoro
  misc_feature (10)..(14): 2'-deoxy-2'-fluoro
  misc_feature (17)..(18): 2'-deoxy-2'-fluoro
  misc_feature (20)..(21): internucleotide phosphorothioate linkage
  misc_feature (1)..(19): ribonucleotide unmodified or modified as described for this sequence
uccaugcaguucuuggucatt

SEQ ID NO: 2025 - DNA, 21 bp, Artificial Sequence
  Synthetic
  misc_feature (3)..(5): 2'-deoxy-2'-fluoro
  misc_feature (7)..(7): 2'-deoxy-2'-fluoro
  misc_feature (9)..(9): 2'-deoxy-2'-fluoro
  misc_feature (12)..(16): 2'-deoxy-2'-fluoro
  misc_feature (19)..(19): 2'-deoxy-2'-fluoro
  misc_feature (20)..(21): internucleotide phosphorothioate linkage
  misc_feature (1)..(19): ribonucleotide unmodified or modified as described for this sequence
gguccaugcaguucuuggutt

SEQ ID NO: 2026 - DNA, 21 bp, Artificial Sequence
  Synthetic
  misc_feature (1)..(1): 2'-deoxy-2'-fluoro
  misc_feature (5)..(7): 2'-deoxy-2'-fluoro
  misc_feature (9)..(9): 2'-deoxy-2'-fluoro
  misc_feature (11)..(11): 2'-deoxy-2'-fluoro
  misc_feature (14)..(18): 2'-deoxy-2'-fluoro
  misc_feature (20)..(21): internucleotide phosphorothioate linkage
  misc_feature (1)..(19): ribonucleotide unmodified or modified as described for this sequence
uagguccaugcaguucuugtt

SEQ ID NO: 2027 - DNA, 21 bp, Artificial Sequence
  Synthetic
  misc_feature (2)..(3): 2'-deoxy-2'-fluoro
  misc_feature (7)..(9): 2'-deoxy-2'-fluoro
  misc_feature (11)..(11): 2'-deoxy-2'-fluoro
  misc_feature (13)..(13): 2'-deoxy-2'-fluoro
  misc_feature (16)..(19): 2'-deoxy-2'-fluoro
  misc_feature (20)..(21): internucleotide phosphorothioate linkage
  misc_feature (1)..(19): ribonucleotide unmodified or modified as described for this sequence
guuagguccaugcaguucutt

SEQ ID NO: 2028 - DNA, 21 bp, Artificial Sequence
  Synthetic
  misc_feature (2)..(2): 2'-deoxy-2'-fluoro
  misc_feature (4)..(5): 2'-deoxy-2'-fluoro
  misc_feature (9)..(11): 2'-deoxy-2'-fluoro
  misc_feature (13)..(13): 2'-deoxy-2'-fluoro
  misc_feature (15)..(15): 2'-deoxy-2'-fluoro
  misc_feature (18)..(19): 2'-deoxy-2'-fluoro
  misc_feature (20)..(21): internucleotide phosphorothioate linkage
  misc_feature (1)..(19): ribonucleotide unmodified or modified as described for this sequence
auguuagguccaugcaguutt

SEQ ID NO: 2029 - DNA, 21 bp, Artificial Sequence
  Synthetic
  misc_feature (3)..(3): 2'-deoxy-2'-fluoro
  misc_feature (5)..(6): 2'-deoxy-2'-fluoro
  misc_feature (10)..(12): 2'-deoxy-2'-fluoro
  misc_feature (14)..(14): 2'-deoxy-2'-fluoro
  misc_feature (16)..(16): 2'-deoxy-2'-fluoro
  misc_feature (19)..(19): 2'-deoxy-2'-fluoro
  misc_feature (20)..(21): internucleotide phosphorothioate linkage
  misc_feature (1)..(19): ribonucleotide unmodified or modified as described for this sequence
aauguuagguccaugcagutt

SEQ ID NO: 2030 - DNA, 21 bp, Artificial Sequence
  Synthetic
  misc_feature (4)..(4): 2'-deoxy-2'-fluoro
  misc_feature (6)..(7): 2'-deoxy-2'-fluoro
  misc_feature (11)..(13): 2'-deoxy-2'-fluoro
  misc_feature (15)..(15): 2'-deoxy-2'-fluoro
  misc_feature (17)..(17): 2'-deoxy-2'-fluoro
  misc_feature (20)..(21): internucleotide phosphorothioate linkage
  misc_feature (1)..(19): ribonucleotide unmodified or modified as described for this sequence
gaauguuagguccaugcagtt

SEQ ID NO: 2031 - DNA, 21 bp, Artificial Sequence
  Synthetic
  misc_feature (1)..(2): 2'-deoxy-2'-fluoro
  misc_feature (6)..(6): 2'-deoxy-2'-fluoro
  misc_feature (8)..(9): 2'-deoxy-2'-fluoro
  misc_feature (13)..(15): 2'-deoxy-2'-fluoro
  misc_feature (17)..(17): 2'-deoxy-2'-fluoro
  misc_feature (19)..(19): 2'-deoxy-2'-fluoro
  misc_feature (20)..(21): internucleotide phosphorothioate linkage
  misc_feature (1)..(19): ribonucleotide unmodified or modified as described for this sequence
ucgaauguuagguccaugctt

SEQ ID NO: 2032 - DNA, 21 bp, Artificial Sequence
  Synthetic
  misc_feature (3)..(4): 2'-deoxy-2'-fluoro
  misc_feature (8)..(8): 2'-deoxy-2'-fluoro
  misc_feature (10)..(11): 2'-deoxy-2'-fluoro
  misc_feature (15)..(17): 2'-deoxy-2'-fluoro
  misc_feature (19)..(19): 2'-deoxy-2'-fluoro
  misc_feature (20)..(21): internucleotide phosphorothioate linkage
  misc_feature (1)..(19): ribonucleotide unmodified or modified as described for this sequence
gaucgaauguuagguccautt

SEQ ID NO: 2033 - DNA, 21 bp, Artificial Sequence
  Synthetic
  misc_feature (1)..(1): 5'-3 attached terminal deoxyabasic moiety
  misc_feature (1)..(1): 2'-deoxy-2'-fluoro
  misc_feature (2)..(3): deoxy
  misc_feature (4)..(5): 2'-deoxy-2'-fluoro
  misc_feature (6)..(6): deoxy
  misc_feature (7)..(7): 2'-deoxy-2'-fluoro
  misc_feature (8)..(9): deoxy
  misc_feature (10)..(15): 2'-deoxy-2'-fluoro
  misc_feature (16)..(19): deoxy
  misc_feature (1)..(19): ribonucleotide unmodified or modified as described for this sequence
  misc_feature (21)..(21): 3'-3 attached terminal deoxyabasic moiety
ugaccgcgacuuuucaaagtt

SEQ ID NO: 2034 - DNA, 21 bp, Artificial Sequence
  Synthetic
  misc_feature (1)..(1): 5'-3 attached terminal deoxyabasic moiety
  misc_feature (1)..(2): deoxy
  misc_feature (3)..(6): 2'-deoxy-2'-fluoro
  misc_feature (7)..(8): deoxy
  misc_feature (9)..(9): 2'-deoxy-2'-fluoro
  misc_feature (10)..(11): deoxy
  misc_feature (12)..(15): 2'-deoxy-2'-fluoro
  misc_feature (16)..(17): deoxy
  misc_feature (18)..(19): 2'-deoxy-2'-fluoro
  misc_feature (1)..(19): ribonucleotide unmodified or modified as described for this sequence
  misc_feature (21)..(21): 3'-3 attached terminal deoxyabasic moiety
aaccucagcaacuucaacctt

SEQ ID NO: 2035 - DNA, 21 bp, Artificial Sequence
  Synthetic
  misc_feature (1)..(1): 5'-3 attached terminal deoxyabasic moiety
  misc_feature (1)..(1): deoxy
  misc_feature (2)..(5): 2'-deoxy-2'-fluoro
  misc_feature (6)..(7): deoxy
  misc_feature (8)..(8): 2'-deoxy-2'-fluoro
  misc_feature (9)..(10): deoxy
  misc_feature (11)..(14): 2'-deoxy-2'-fluoro
  misc_feature (15)..(16): deoxy
  misc_feature (17)..(19): 2'-deoxy-2'-fluoro
  misc_feature (1)..(19): ribonucleotide unmodified or modified as described for this sequence
  misc_feature (21)..(21): 3'-3 attached terminal deoxyabasic moiety
accucagcaacuucaaccctt

SEQ ID NO: 2036 - DNA, 21 bp, Artificial Sequence
  Synthetic
  misc_feature (1)..(1): 5'-3 attached terminal deoxyabasic moiety
  misc_feature (1)..(7): deoxy
  misc_feature (8)..(8): 2'-deoxy-2'-fluoro
  misc_feature (9)..(13): deoxy
  misc_feature (14)..(17): 2'-deoxy-2'-fluoro
  misc_feature (18)..(19): deoxy
  misc_feature (1)..(19): ribonucleotide unmodified or modified as described for this sequence
  misc_feature (21)..(21): 3'-3 attached terminal deoxyabasic moiety
gaaaaagugaaaaccuugatt

SEQ ID NO: 2037 - DNA, 21 bp, Artificial Sequence
  Synthetic
  misc_feature (1)..(1): 5'-3 attached terminal deoxyabasic moiety
  misc_feature (1)..(6): deoxy
  misc_feature (7)..(7): 2'-deoxy-2'-fluoro
  misc_feature (8)..(12): deoxy
  misc_feature (13)..(16): 2'-deoxy-2'-fluoro
  misc_feature (17)..(19): deoxy
  misc_feature (1)..(19): ribonucleotide unmodified or modified as described for this sequence
  misc_feature (21)..(21): 3'-3 attached terminal deoxyabasic moiety
aaaaagugaaaaccuugaatt

SEQ ID NO: 2038 - DNA, 21 bp, Artificial Sequence
  Synthetic
  misc_feature (1)..(1): 5'-3 attached terminal deoxyabasic moiety
  misc_feature (1)..(1): 2'-deoxy-2'-fluoro
  misc_feature (2)..(7): deoxy
  misc_feature (8)..(8): 2'-deoxy-2'-fluoro
  misc_feature (9)..(11): deoxy
  misc_feature (12)..(12): 2'-deoxy-2'-fluoro
  misc_feature (13)..(14): deoxy
  misc_feature (15)..(15): 2'-deoxy-2'-fluoro
  misc_feature (16)..(16): deoxy
  misc_feature (17)..(17): 2'-deoxy-2'-fluoro
  misc_feature (18)..(19): deoxy
  misc_feature (1)..(19): ribonucleotide unmodified or modified as described for this sequence
  misc_feature (21)..(21): 3'-3 attached terminal deoxyabasic moiety
cagggaacagguggcacagtt

SEQ ID NO: 2039 - DNA, 21 bp, Artificial Sequence
  Synthetic
  misc_feature (1)..(1): 5'-3 attached terminal deoxyabasic moiety
  misc_feature (1)..(6): deoxy
  misc_feature (7)..(8): 2'-deoxy-2'-fluoro
  misc_feature (9)..(9): deoxy
  misc_feature (10)..(10): 2'-deoxy-2'-fluoro
  misc_feature (11)..(13): deoxy
  misc_feature (14)..(15): 2'-deoxy-2'-fluoro
  misc_feature (16)..(16): deoxy
  misc_feature (17)..(17): 2'-deoxy-2'-fluoro
  misc_feature (18)..(18): deoxy
  misc_feature (19)..(19): 2'-deoxy-2'-fluoro
  misc_feature (1)..(19): ribonucleotide unmodified or modified as described for this sequence
  misc_feature (21)..(21): 3'-3 attached terminal deoxyabasic moiety
agaaagucaugaaccacgutt

SEQ ID NO: 2040 - DNA, 21 bp, Artificial Sequence
  Synthetic
  misc_feature (1)..(1): 5'-3 attached terminal deoxyabasic moiety
  misc_feature (1)..(5): deoxy
  misc_feature (6)..(7): 2'-deoxy-2'-fluoro
  misc_feature (8)..(8): deoxy
  misc_feature (9)..(9): 2'-deoxy-2'-fluoro
  misc_feature (10)..(12): deoxy
  misc_feature (13)..(14): 2'-deoxy-2'-fluoro
  misc_feature (15)..(15): deoxy
  misc_feature (16)..(16): 2'-deoxy-2'-fluoro
  misc_feature (17)..(17): deoxy
  misc_feature (18)..(19): 2'-deoxy-2'-fluoro
  misc_feature (1)..(19): ribonucleotide unmodified or modified as described for this sequence
  misc_feature (21)..(21): 3'-3 attached terminal deoxyabasic moiety
gaaagucaugaaccacguutt

SEQ ID NO: 2041 - DNA, 21 bp, Artificial Sequence
  Synthetic
  misc_feature (1)..(1): 5'-3 attached terminal deoxyabasic moiety
  misc_feature (1)..(3): deoxy
  misc_feature (4)..(5): 2'-deoxy-2'-fluoro
  misc_feature (6)..(6): deoxy
  misc_feature (7)..(7): 2'-deoxy-2'-fluoro
  misc_feature (8)..(10): deoxy
  misc_feature (11)..(12): 2'-deoxy-2'-fluoro
  misc_feature (13)..(13): deoxy
  misc_feature (14)..(14): 2'-deoxy-2'-fluoro
  misc_feature (15)..(15): deoxy
  misc_feature (16)..(17): 2'-deoxy-2'-fluoro
  misc_feature (18)..(19): deoxy
  misc_feature (1)..(19): ribonucleotide unmodified or modified as described for this sequence
  misc_feature (21)..(21): 3'-3 attached terminal deoxyabasic moiety
aagucaugaaccacguuaatt

SEQ ID NO: 2042 - DNA, 21 bp, Artificial Sequence
  Synthetic
  misc_feature (1)..(1): 5'-3 attached terminal deoxyabasic moiety
  misc_feature (1)..(2): 2'-deoxy-2'-fluoro
  misc_feature (3)..(3): deoxy
  misc_feature (4)..(4): 2'-deoxy-2'-fluoro
  misc_feature (5)..(7): deoxy
  misc_feature (8)..(9): 2'-deoxy-2'-fluoro
  misc_feature (10)..(10): deoxy
  misc_feature (11)..(11): 2'-deoxy-2'-fluoro
  misc_feature (12)..(12): deoxy
  misc_feature (13)..(14): 2'-deoxy-2'-fluoro
  misc_feature (15)..(16): deoxy
  misc_feature (17)..(17): 2'-deoxy-2'-fluoro
  misc_feature (18)..(19): deoxy
  misc_feature (1)..(19): ribonucleotide unmodified or modified as described for this sequence
  misc_feature (21)..(21): 3'-3 attached terminal deoxyabasic moiety
ucaugaaccacguuaacagtt

SEQ ID NO: 2043 - DNA, 21 bp, Artificial Sequence
  Synthetic
  misc_feature (1)..(1): 5'-3 attached terminal deoxyabasic moiety
  misc_feature (1)..(2): deoxy
  misc_feature (3)..(3): 2'-deoxy-2'-fluoro
  misc_feature (4)..(6): deoxy
  misc_feature (7)..(7): 2'-deoxy-2'-fluoro
  misc_feature (8)..(8): deoxy
  misc_feature (9)..(10): 2'-deoxy-2'-fluoro
  misc_feature (11)..(12): deoxy
  misc_feature (13)..(15): 2'-deoxy-2'-fluoro
  misc_feature (16)..(16): deoxy
  misc_feature (17)..(17): 2'-deoxy-2'-fluoro
  misc_feature (18)..(18): deoxy
  misc_feature (19)..(19): 2'-deoxy-2'-fluoro
  misc_feature (1)..(19): ribonucleotide unmodified or modified as described for this sequence
  misc_feature (21)..(21): 3'-3 attached terminal deoxyabasic moiety
agugggugccaacucaugctt

SEQ ID NO: 2044 - DNA, 21 bp, Artificial Sequence
  Synthetic
  misc_feature (1)..(1): 5'-3 attached terminal deoxyabasic moiety
  misc_feature (1)..(1): 2'-deoxy-2'-fluoro
  misc_feature (2)..(2): deoxy
  misc_feature (3)..(4): 2'-deoxy-2'-fluoro
  misc_feature (5)..(6): deoxy
  misc_feature (7)..(9): 2'-deoxy-2'-fluoro
  misc_feature (10)..(10): deoxy
  misc_feature (11)..(11): 2'-deoxy-2'-fluoro
  misc_feature (12)..(12): deoxy
  misc_feature (13)..(14): 2'-deoxy-2'-fluoro
  misc_feature (15)..(16): deoxy
  misc_feature (17)..(17): 2'-deoxy-2'-fluoro
  misc_feature (18)..(18): deoxy
  misc_feature (19)..(19): 2'-deoxy-2'-fluoro
  misc_feature (1)..(19): ribonucleotide unmodified or modified as described for this sequence
  misc_feature (21)..(21): 3'-3 attached terminal deoxyabasic moiety
ugccaacucaugcuaacgctt

SEQ ID NO: 2045 - DNA, 21 bp, Artificial Sequence
  Synthetic
  misc_feature (1)..(1): 5'-3 attached terminal deoxyabasic moiety
  misc_feature (1)..(1): deoxy
  misc_feature (2)..(3): 2'-deoxy-2'-fluoro
  misc_feature (4)..(5): deoxy
  misc_feature (6)..(8): 2'-deoxy-2'-fluoro
  misc_feature (9)..(9): deoxy
  misc_feature (10)..(10): 2'-deoxy-2'-fluoro
  misc_feature (11)..(11): deoxy
  misc_feature (12)..(13): 2'-deoxy-2'-fluoro
  misc_feature (14)..(15): deoxy
  misc_feature (16)..(16): 2'-deoxy-2'-fluoro
  misc_feature (17)..(17): deoxy
  misc_feature (18)..(18): 2'-deoxy-2'-fluoro
  misc_feature (19)..(19): deoxy
  misc_feature (1)..(19): ribonucleotide unmodified or modified as described for this sequence
  misc_feature (21)..(21): 3'-3 attached terminal deoxyabasic moiety
gccaacucaugcuaacgcatt

SEQ ID NO: 2046 - DNA, 21 bp, Artificial Sequence
  Synthetic
  misc_feature (1)..(1): 5'-3 attached terminal deoxyabasic moiety
  misc_feature (1)..(1): 2'-deoxy-2'-fluoro
  misc_feature (2)..(3): deoxy
  misc_feature (4)..(6): 2'-deoxy-2'-fluoro
  misc_feature (7)..(7): deoxy
  misc_feature (8)..(8): 2'-deoxy-2'-fluoro
  misc_feature (9)..(9): deoxy
  misc_feature (10)..(11): 2'-deoxy-2'-fluoro
  misc_feature (12)..(13): deoxy
  misc_feature (14)..(14): 2'-deoxy-2'-fluoro
  misc_feature (15)..(15): deoxy
  misc_feature (16)..(16): 2'-deoxy-2'-fluoro
  misc_feature (17)..(18): deoxy
  misc_feature (19)..(19): 2'-deoxy-2'-fluoro
  misc_feature (1)..(19): ribonucleotide unmodified or modified as described for this sequence
  misc_feature (21)..(21): 3'-3 attached terminal deoxyabasic moiety
caacucaugcuaacgcagctt

SEQ ID NO: 2047 - DNA, 21 bp, Artificial Sequence
  Synthetic
  misc_feature (1)..(1): 5'-3 attached terminal deoxyabasic moiety
  misc_feature (1)..(2): deoxy
  misc_feature (3)..(5): 2'-deoxy-2'-fluoro
  misc_feature (6)..(6): deoxy
  misc_feature (7)..(7): 2'-deoxy-2'-fluoro
  misc_feature (8)..(8): deoxy
  misc_feature (9)..(10): 2'-deoxy-2'-fluoro
  misc_feature (11)..(12): deoxy
  misc_feature (13)..(13): 2'-deoxy-2'-fluoro
  misc_feature (14)..(14): deoxy
  misc_feature (15)..(15): 2'-deoxy-2'-fluoro
  misc_feature (16)..(17): deoxy
  misc_feature (18)..(18): 2'-deoxy-2'-fluoro
  misc_feature (19)..(19): deoxy
  misc_feature (1)..(19): ribonucleotide unmodified or modified as described for this sequence
  misc_feature (21)..(21): 3'-3 attached terminal deoxyabasic moiety
aacucaugcuaacgcagcatt

SEQ ID NO: 2048 - DNA, 21 bp, Artificial Sequence
  Synthetic
  misc_feature (1)..(1): 5'-3 attached terminal deoxyabasic moiety
  misc_feature (1)..(1): deoxy
  misc_feature (2)..(4): 2'-deoxy-2'-fluoro
  misc_feature (5)..(5): deoxy
  misc_feature (6)..(6): 2'-deoxy-2'-fluoro
  misc_feature (7)..(7): deoxy
  misc_feature (8)..(9): 2'-deoxy-2'-fluoro
  misc_feature (10)..(11): deoxy
  misc_feature (12)..(12): 2'-deoxy-2'-fluoro
  misc_feature (13)..(13): deoxy
  misc_feature (14)..(14): 2'-deoxy-2'-fluoro
  misc_feature (15)..(16): deoxy
  misc_feature (17)..(17): 2'-deoxy-2'-fluoro
  misc_feature (18)..(19): deoxy
  misc_feature (1)..(19): ribonucleotide unmodified or modified as described for this sequence
  misc_feature (21)..(21): 3'-3 attached terminal deoxyabasic moiety
acucaugcuaacgcagcagtt

SEQ ID NO: 2049 - DNA, 21 bp, Artificial Sequence
  Synthetic
  misc_feature (1)..(1): 5'-3 attached terminal deoxyabasic moiety
  misc_feature (1)..(1): 2'-deoxy-2'-fluoro
  misc_feature (2)..(2): deoxy
  misc_feature (3)..(4): 2'-deoxy-2'-fluoro
  misc_feature (5)..(6): deoxy
  misc_feature (7)..(8): 2'-deoxy-2'-fluoro
  misc_feature (9)..(13): deoxy
  misc_feature (14)..(15): 2'-deoxy-2'-fluoro
  misc_feature (16)..(16): deoxy
  misc_feature (17)..(17): 2'-deoxy-2'-fluoro
  misc_feature (18)..(18): deoxy
  misc_feature (19)..(19): 2'-deoxy-2'-fluoro
  misc_feature (1)..(19): ribonucleotide unmodified or modified as described for this sequence
  misc_feature (21)..(21): 3'-3 attached terminal deoxyabasic moiety
cauugaccaagaacugcautt

SEQ ID NO: 2050 - DNA, 21 bp, Artificial Sequence
  Synthetic
  misc_feature (1)..(1): 5'-3 attached terminal deoxyabasic moiety
  misc_feature (1)..(1): deoxy
  misc_feature (2)..(3): 2'-deoxy-2'-fluoro
  misc_feature (4)..(5): deoxy
  misc_feature (6)..(7): 2'-deoxy-2'-fluoro
  misc_feature (8)..(12): deoxy
  misc_feature (13)..(14): 2'-deoxy-2'-fluoro
  misc_feature (15)..(15): deoxy
  misc_feature (16)..(16): 2'-deoxy-2'-fluoro
  misc_feature (17)..(17): deoxy
  misc_feature (18)..(18): 2'-deoxy-2'-fluoro
  misc_feature (19)..(19): deoxy
  misc_feature (1)..(19): ribonucleotide unmodified or modified as described for this sequence
  misc_feature (21)..(21): 3'-3 attached terminal deoxyabasic moiety
auugaccaagaacugcaugtt

SEQ ID NO: 2051 - DNA, 21 bp, Artificial Sequence
  Synthetic
  misc_feature (1)..(1): 5'-3 attached terminal deoxyabasic moiety
  misc_feature (1)..(2): 2'-deoxy-2'-fluoro
  misc_feature (3)..(4): deoxy
  misc_feature (5)..(6): 2'-deoxy-2'-fluoro
  misc_feature (7)..(11): deoxy
  misc_feature (12)..(13): 2'-deoxy-2'-fluoro
  misc_feature (14)..(14): deoxy
  misc_feature (15)..(15): 2'-deoxy-2'-fluoro
  misc_feature (16)..(16): deoxy
  misc_feature (17)..(17): 2'-deoxy-2'-fluoro
  misc_feature (18)..(19): deoxy
  misc_feature (1)..(19): ribonucleotide unmodified or modified as described for this sequence
  misc_feature (21)..(21): 3'-3 attached terminal deoxyabasic moiety
uugaccaagaacugcauggtt

SEQ ID NO: 2052 - DNA, 21 bp, Artificial Sequence
  Synthetic
  misc_feature (1)..(1): 5'-3 attached terminal deoxyabasic moiety
  misc_feature (1)..(1): 2'-deoxy-2'-fluoro
  misc_feature (2)..(3): deoxy
  misc_feature (4)..(5): 2'-deoxy-2'-fluoro
  misc_feature (6)..(10): deoxy
  misc_feature (11)..(12): 2'-deoxy-2'-fluoro
  misc_feature (13)..(13): deoxy
  misc_feature (14)..(14): 2'-deoxy-2'-fluoro
  misc_feature (15)..(15): deoxy
  misc_feature (16)..(16): 2'-deoxy-2'-fluoro
  misc_feature (17)..(19): deoxy
  misc_feature (1)..(19): ribonucleotide unmodified or modified as described for this sequence
  misc_feature (21)..(21): 3'-3 attached terminal deoxyabasic moiety
ugaccaagaacugcauggatt

SEQ ID NO: 2053 - DNA, 21 bp, Artificial Sequence
  Synthetic
  misc_feature (1)..(1): 5'-3 attached terminal deoxyabasic moiety
  misc_feature (1)..(1): deoxy
  misc_feature (2)..(3): 2'-deoxy-2'-fluoro
  misc_feature (4)..(8): deoxy
  misc_feature (9)..(10): 2'-deoxy-2'-fluoro
  misc_feature (11)..(11): deoxy
  misc_feature (12)..(12): 2'-deoxy-2'-fluoro
  misc_feature (13)..(13): deoxy
  misc_feature (14)..(14): 2'-deoxy-2'-fluoro
  misc_feature (15)..(17): deoxy
  misc_feature (18)..(19): 2'-deoxy-2'-fluoro
  misc_feature (1)..(19): ribonucleotide unmodified or modified as described for this sequence
  misc_feature (21)..(21): 3'-3 attached terminal deoxyabasic moiety
accaagaacugcauggacctt

SEQ ID NO: 2054 - DNA, 21 bp, Artificial Sequence
  Synthetic
  misc_feature (1)..(1): 5'-3 attached terminal deoxyabasic moiety
  misc_feature (1)..(1): 2'-deoxy-2'-fluoro
  misc_feature (2)..(6): deoxy
  misc_feature (7)..(8): 2'-deoxy-2'-fluoro
  misc_feature (9)..(9): deoxy
  misc_feature (10)..(10): 2'-deoxy-2'-fluoro
  misc_feature (11)..(11): deoxy
  misc_feature (12)..(12): 2'-deoxy-2'-fluoro
  misc_feature (13)..(15): deoxy
  misc_feature (16)..(18): 2'-deoxy-2'-fluoro
  misc_feature (19)..(19): deoxy
  misc_feature (1)..(19): ribonucleotide unmodified or modified as described for this sequence
  misc_feature (21)..(21): 3'-3 attached terminal deoxyabasic moiety
caagaacugcauggaccuatt

SEQ ID NO: 2055 - DNA, 21 bp, Artificial Sequence
  Synthetic
  misc_feature (1)..(1): 5'-3 attached terminal deoxyabasic moiety
  misc_feature (1)..(4): deoxy
  misc_feature (5)..(6): 2'-deoxy-2'-fluoro
  misc_feature (7)..(7): deoxy
  misc_feature (8)..(8): 2'-deoxy-2'-fluoro
  misc_feature (9)..(9): deoxy
  misc_feature (10)..(10): 2'-deoxy-2'-fluoro
  misc_feature (11)..(13): deoxy
  misc_feature (14)..(16): 2'-deoxy-2'-fluoro
  misc_feature (17)..(18): deoxy
  misc_feature (19)..(19): 2'-deoxy-2'-fluoro
  misc_feature (1)..(19): ribonucleotide unmodified or modified as described for this sequence
  misc_feature (21)..(21): 3'-3 attached terminal deoxyabasic moiety
agaacugcauggaccuaactt

SEQ ID NO: 2056 - DNA, 21 bp, Artificial Sequence
  Synthetic
  misc_feature (1)..(1): 5'-3 attached terminal deoxyabasic moiety
  misc_feature (1)..(2): deoxy
  misc_feature (3)..(4): 2'-deoxy-2'-fluoro
  misc_feature (5)..(5): deoxy
  misc_feature (6)..(6): 2'-deoxy-2'-fluoro
  misc_feature (7)..(7): deoxy
  misc_feature (8)..(8): 2'-deoxy-2'-fluoro
  misc_feature (9)..(11): deoxy
  misc_feature (12)..(14): 2'-deoxy-2'-fluoro
  misc_feature (15)..(16): deoxy
  misc_feature (17)..(17): 2'-deoxy-2'-fluoro
  misc_feature (18)..(18): deoxy
  misc_feature (19)..(19): 2'-deoxy-2'-fluoro
  misc_feature (1)..(19): ribonucleotide unmodified or modified as described for this sequence
  misc_feature (21)..(21): 3'-3 attached terminal deoxyabasic moiety
aacugcauggaccuaacautt

SEQ ID NO: 2057 - DNA, 21 bp, Artificial Sequence
  Synthetic
  misc_feature (1)..(1): 5'-3 attached terminal deoxyabasic moiety
  misc_feature (1)..(1): deoxy
  misc_feature (2)..(3): 2'-deoxy-2'-fluoro
  misc_feature (4)..(4): deoxy
  misc_feature (5)..(5): 2'-deoxy-2'-fluoro
  misc_feature (6)..(6): deoxy
  misc_feature (7)..(7): 2'-deoxy-2'-fluoro
  misc_feature (8)..(10): deoxy
  misc_feature (11)..(13): 2'-deoxy-2'-fluoro
  misc_feature (14)..(15): deoxy
  misc_feature (16)..(16): 2'-deoxy-2'-fluoro
  misc_feature (17)..(17): deoxy
  misc_feature (18)..(19): 2'-deoxy-2'-fluoro
  misc_feature (1)..(19): ribonucleotide unmodified or modified as described for this sequence
  misc_feature (21)..(21): 3'-3 attached terminal deoxyabasic moiety
acugcauggaccuaacauutt

SEQ ID NO: 2058 - DNA, 21 bp, Artificial Sequence
  Synthetic
  misc_feature (1)..(1): 5'-3 attached terminal deoxyabasic moiety
  misc_feature (1)..(2): 2'-deoxy-2'-fluoro
  misc_feature (3)..(3): deoxy
  misc_feature (4)..(4): 2'-deoxy-2'-fluoro
  misc_feature (5)..(5): deoxy
  misc_feature (6)..(6): 2'-deoxy-2'-fluoro
  misc_feature (7)..(9): deoxy
  misc_feature (10)..(12): 2'-deoxy-2'-fluoro
  misc_feature (13)..(14): deoxy
  misc_feature (15)..(15): 2'-deoxy-2'-fluoro
  misc_feature (16)..(16): deoxy
  misc_feature (17)..(19): 2'-deoxy-2'-fluoro
  misc_feature (1)..(19): ribonucleotide unmodified or modified as described for this sequence
  misc_feature (21)..(21): 3'-3 attached terminal deoxyabasic moiety
cugcauggaccuaacauuctt

SEQ ID NO: 2059 - DNA, 21 bp, Artificial Sequence
  Synthetic
  misc_feature (1)..(1): 5'-3 attached terminal deoxyabasic moiety
  misc_feature (1)..(1): deoxy
  misc_feature (2)..(2): 2'-deoxy-2'-fluoro
  misc_feature (3)..(3): deoxy
  misc_feature (4)..(4): 2'-deoxy-2'-fluoro
  misc_feature (5)..(7): deoxy
  misc_feature (8)..(10): 2'-deoxy-2'-fluoro
  misc_feature (11)..(12): deoxy
  misc_feature (13)..(13): 2'-deoxy-2'-fluoro
  misc_feature (14)..(14): deoxy
  misc_feature (15)..(17): 2'-deoxy-2'-fluoro
  misc_feature (18)..(19): deoxy
  misc_feature (1)..(19): ribonucleotide unmodified or modified as described for this sequence
  misc_feature (21)..(21): 3'-3 attached terminal deoxyabasic moiety
gcauggaccuaacauucgatt

SEQ ID NO: 2060 - DNA, 21 bp, Artificial Sequence
  Synthetic
  misc_feature (1)..(1): 5'-3 attached terminal deoxyabasic moiety
  misc_feature (1)..(1): deoxy
  misc_feature (2)..(2): 2'-deoxy-2'-fluoro
  misc_feature (3)..(5): deoxy
  misc_feature (6)..(8): 2'-deoxy-2'-fluoro
  misc_feature (9)..(10): deoxy
  misc_feature (11)..(11): 2'-deoxy-2'-fluoro
  misc_feature (12)..(12): deoxy
  misc_feature (13)..(15): 2'-deoxy-2'-fluoro
  misc_feature (16)..(17): deoxy
  misc_feature (18)..(19): 2'-deoxy-2'-fluoro
  misc_feature (1)..(19): ribonucleotide unmodified or modified as described for this sequence
  misc_feature (21)..(21): 3'-3 attached terminal deoxyabasic moiety
auggaccuaacauucgauctt

SEQ ID NO: 2061 - DNA, 21 bp, Artificial Sequence
  Synthetic
  misc_feature (1)..(4): 2'-deoxy-2'-fluoro
  misc_feature (5)..(10): deoxy
  misc_feature (11)..(12): 2'-deoxy-2'-fluoro
  misc_feature (13)..(13): deoxy
  misc_feature (14)..(14): 2'-deoxy-2'-fluoro
  misc_feature (15)..(16): deoxy
  misc_feature (17)..(18): 2'-deoxy-2'-fluoro
  misc_feature (19)..(19): deoxy
  misc_feature (20)..(21): internucleotide phosphorothioate linkage
  misc_feature (1)..(19): ribonucleotide unmodified or modified as described for this sequence
cuuugaaaagucgcggucatt

SEQ ID NO: 2062 - DNA, 21 bp, Artificial Sequence
  Synthetic
  misc_feature (1)..(2): deoxy
  misc_feature (3)..(4): 2'-deoxy-2'-fluoro
  misc_feature (5)..(8): deoxy
  misc_feature (9)..(10): 2'-deoxy-2'-fluoro
  misc_feature (11)..(11): deoxy
  misc_feature (12)..(13): 2'-deoxy-2'-fluoro
  misc_feature (14)..(17): deoxy
  misc_feature (18)..(19): 2'-deoxy-2'-fluoro
  misc_feature (20)..(21): internucleotide phosphorothioate linkage
  misc_feature (1)..(19): ribonucleotide unmodified or modified as described for this sequence
gguugaaguugcugagguutt

SEQ ID NO: 2063 - DNA, 21 bp, Artificial Sequence
  Synthetic
  misc_feature (1)..(3): deoxy
  misc_feature (4)..(5): 2'-deoxy-2'-fluoro
  misc_feature (6)..(9): deoxy
  misc_feature (10)..(11): 2'-deoxy-2'-fluoro
  misc_feature (12)..(12): deoxy
  misc_feature (13)..(14): 2'-deoxy-2'-fluoro
  misc_feature (15)..(18): deoxy
  misc_feature (19)..(19): 2'-deoxy-2'-fluoro
  misc_feature (20)..(21): internucleotide phosphorothioate linkage
  misc_feature (1)..(19): ribonucleotide unmodified or modified as described for this sequence
ggguugaaguugcugaggutt

SEQ ID NO: 2064 - DNA, 21 bp, Artificial Sequence
  Synthetic
  misc_feature (1)..(2): 2'-deoxy-2'-fluoro
  misc_feature (3)..(6): deoxy
  misc_feature (7)..(11): 2'-deoxy-2'-fluoro
  misc_feature (12)..(12): deoxy
  misc_feature (13)..(19): 2'-deoxy-2'-fluoro
  misc_feature (20)..(21): internucleotide phosphorothioate linkage
  misc_feature (1)..(19): ribonucleotide unmodified or modified as described for this sequence
ucaagguuuucacuuuuuctt

SEQ ID NO: 2065 - DNA, 21 bp, Artificial Sequence
  Synthetic
  misc_feature (1)..(3): 2'-deoxy-2'-fluoro
  misc_feature (4)..(7): deoxy
  misc_feature (8)..(12): 2'-deoxy-2'-fluoro
  misc_feature (13)..(13): deoxy
  misc_feature (14)..(19): 2'-deoxy-2'-fluoro
  misc_feature (20)..(21): internucleotide phosphorothioate linkage
  misc_feature (1)..(19): ribonucleotide unmodified or modified as described for this sequence
uucaagguuuucacuuuuutt

SEQ ID NO: 2066 - DNA, 21 bp, Artificial Sequence
  Synthetic
  misc_feature (1)..(2): 2'-deoxy-2'-fluoro
  misc_feature (3)..(3): deoxy
  misc_feature (4)..(4): 2'-deoxy-2'-fluoro
  misc_feature (5)..(5): deoxy
  misc_feature (6)..(7): 2'-deoxy-2'-fluoro
  misc_feature (8)..(11): 2'-deoxy-2'-fluoro
  misc_feature (8)..(8): deoxy
  misc_feature (12)..(12): deoxy
  misc_feature (13)..(18): 2'-deoxy-2'-fluoro
  misc_feature (19)..(19): deoxy
  misc_feature (20)..(21): internucleotide phosphorothioate linkage
  misc_feature (1)..(19): ribonucleotide unmodified or modified as described for this sequence
cugugccaccuguucccugtt

SEQ ID NO: 2067 - DNA, 21 bp, Artificial Sequence
  Synthetic
  misc_feature (1)..(1): deoxy
  misc_feature (2)..(2): 2'-deoxy-2'-fluoro
  misc_feature (3)..(3): deoxy
  misc_feature (4)..(4): 2'-deoxy-2'-fluoro
  misc_feature (5)..(6): deoxy
  misc_feature (7)..(9): 2'-deoxy-2'-fluoro
  misc_feature (10)..(10): deoxy
  misc_feature (11)..(11): 2'-deoxy-2'-fluoro
  misc_feature (12)..(13): deoxy
  misc_feature (14)..(19): 2'-deoxy-2'-fluoro
  misc_feature (20)..(21): internucleotide phosphorothioate linkage
  misc_feature (1)..(19): ribonucleotide unmodified or modified as described for this sequence
acgugguucaugacuuucutt

SEQ ID NO: 2068 - DNA, 21 bp, Artificial Sequence
  Synthetic
  misc_feature (1)..(2): deoxy
  misc_feature (3)..(3): 2'-deoxy-2'-fluoro
  misc_feature (4)..(4): deoxy
  misc_feature (5)..(5): 2'-deoxy-2'-fluoro
  misc_feature (6)..(7): deoxy
  misc_feature (8)..(10): 2'-deoxy-2'-fluoro
  misc_feature (11)..(11): deoxy
  misc_feature (12)..(12): 2'-deoxy-2'-fluoro
  misc_feature (13)..(14): deoxy
  misc_feature (15)..(19): 2'-deoxy-2'-fluoro
  misc_feature (20)..(21): internucleotide phosphorothioate linkage
  misc_feature (1)..(19): ribonucleotide unmodified or modified as described for this sequence
aacgugguucaugacuuuctt

SEQ ID NO: 2069 - DNA, 21 bp, Artificial Sequence
  Synthetic
  misc_feature (1)..(2): 2'-deoxy-2'-fluoro
  misc_feature (3)..(4): deoxy
  misc_feature (5)..(5): 2'-deoxy-2'-fluoro
  misc_feature (6)..(6): deoxy
  misc_feature (7)..(7): 2'-deoxy-2'-fluoro
  misc_feature (8)..(9): deoxy
  misc_feature (10)..(12): 2'-deoxy-2'-fluoro
  misc_feature (13)..(13): deoxy
  misc_feature (14)..(14): 2'-deoxy-2'-fluoro
  misc_feature (15)..(16): deoxy
  misc_feature (17)..(19): 2'-deoxy-2'-fluoro
  misc_feature (20)..(21): internucleotide phosphorothioate linkage
  misc_feature (1)..(19): ribonucleotide unmodified or modified as described for this sequence
uuaacgugguucaugacuutt

SEQ ID NO: 2070 - DNA, 21 bp, Artificial Sequence
  Synthetic
  misc_feature (1)..(2): 2'-deoxy-2'-fluoro
  misc_feature (3)..(3): deoxy
  misc_feature (4)..(5): 2'-deoxy-2'-fluoro
  misc_feature (6)..(7): deoxy
  misc_feature (8)..(8): 2'-deoxy-2'-fluoro
  misc_feature (9)..(9): deoxy
  misc_feature (10)..(10): 2'-deoxy-2'-fluoro
  misc_feature (11)..(12): deoxy
  misc_feature (13)..(15): 2'-deoxy-2'-fluoro
  misc_feature (16)..(16): deoxy
  misc_feature (17)..(17): 2'-deoxy-2'-fluoro
  misc_feature (18)..(19): deoxy
  misc_feature (20)..(21): internucleotide phosphorothioate linkage
  misc_feature (1)..(19): ribonucleotide unmodified or modified as described for this sequence
cuguuaacgugguucaugatt

SEQ ID NO: 2071 - DNA, 21 bp, Artificial Sequence
  Synthetic
  misc_feature (1)..(1): deoxy
  misc_feature (2)..(2): 2'-deoxy-2'-fluoro
  misc_feature (3)..(3): deoxy
  misc_feature (4)..(4): 2'-deoxy-2'-fluoro
  misc_feature (5)..(7): deoxy
  misc_feature (8)..(9): 2'-deoxy-2'-fluoro
  misc_feature (10)..(11): deoxy
  misc_feature (12)..(12): 2'-deoxy-2'-fluoro
  misc_feature (13)..(13): deoxy
  misc_feature (14)..(16): 2'-deoxy-2'-fluoro
  misc_feature (17)..(17): deoxy
  misc_feature (18)..(19): 2'-deoxy-2'-fluoro
  misc_feature (20)..(21): internucleotide phosphorothioate linkage
  misc_feature (1)..(19): ribonucleotide unmodified or modified as described for this sequence
gcaugaguuggcacccacutt

SEQ ID NO: 2072 - DNA, 21 bp, Artificial Sequence
  Synthetic
  misc_feature (1)..(1): deoxy
  misc_feature (2)..(2): 2'-deoxy-2'-fluoro
  misc_feature (3)..(3): deoxy
  misc_feature (4)..(5): 2'-deoxy-2'-fluoro
  misc_feature (6)..(7): deoxy
  misc_feature (8)..(8): 2'-deoxy-2'-fluoro
  misc_feature (9)..(9): deoxy
  misc_feature (10)..(10): 2'-deoxy-2'-fluoro
  misc_feature (11)..(13): deoxy
  misc_feature (14)..(15): 2'-deoxy-2'-fluoro
  misc_feature (16)..(17): deoxy
  misc_feature (18)..(18): 2'-deoxy-2'-fluoro
  misc_feature (19)..(19): deoxy
  misc_feature (20)..(21): internucleotide phosphorothioate linkage
  misc_feature (1)..(19): ribonucleotide unmodified or modified as described for this sequence
gcguuagcaugaguuggcatt

SEQ ID NO: 2073 - DNA, 21 bp, Artificial Sequence
  Synthetic
  misc_feature (1)..(1): 2'-deoxy-2'-fluoro
  misc_feature (2)..(2): deoxy
  misc_feature (3)..(3): 2'-deoxy-2'-fluoro
  misc_feature (4)..(4): deoxy
  misc_feature (5)..(6): 2'-deoxy-2'-fluoro
  misc_feature (7)..(8): deoxy
  misc_feature (9)..(9): 2'-deoxy-2'-fluoro
  misc_feature (10)..(10): deoxy
  misc_feature (11)..(11): 2'-deoxy-2'-fluoro
  misc_feature (12)..(14): deoxy
  misc_feature (15)..(16): 2'-deoxy-2'-fluoro
  misc_feature (17)..(18): deoxy
  misc_feature (19)..(19): 2'-deoxy-2'-fluoro
  misc_feature (20)..(21): internucleotide phosphorothioate linkage
  misc_feature (1)..(19): ribonucleotide unmodified or modified as described for this sequence
ugcguuagcaugaguuggctt

SEQ ID NO: 2074 - DNA, 21 bp, Artificial Sequence
  Synthetic
  misc_feature (1)..(1): deoxy
  misc_feature (2)..(3): 2'-deoxy-2'-fluoro
  misc_feature (4)..(4): deoxy
  misc_feature (5)..(5): 2'-deoxy-2'-fluoro
  misc_feature (6)..(6): deoxy
  misc_feature (7)..(8): 2'-deoxy-2'-fluoro
  misc_feature (9)..(10): deoxy
  misc_feature (11)..(11): 2'-deoxy-2'-fluoro
  misc_feature (12)..(12): deoxy
  misc_feature (13)..(13): 2'-deoxy-2'-fluoro
  misc_feature (14)..(16): deoxy
  misc_feature (17)..(18): 2'-deoxy-2'-fluoro
  misc_feature (19)..(19): deoxy
  misc_feature (20)..(21): internucleotide phosphorothioate linkage
  misc_feature (1)..(19): ribonucleotide unmodified or modified as described for this sequence
gcugcguuagcaugaguugtt

SEQ ID NO: 2075 - DNA, 21 bp, Artificial Sequence
  Synthetic
  misc_feature (1)..(1): 2'-deoxy-2'-fluoro
  misc_feature (2)..(2): deoxy
  misc_feature (3)..(4): 2'-deoxy-2'-fluoro
  misc_feature (5)..(5): deoxy
  misc_feature (6)..(6): 2'-deoxy-2'-fluoro
  misc_feature (7)..(7): deoxy
  misc_feature (8)..(9): 2'-deoxy-2'-fluoro
  misc_feature (10)..(11): deoxy
  misc_feature (12)..(12): 2'-deoxy-2'-fluoro
  misc_feature (13)..(13): deoxy
  misc_feature (14)..(14): 2'-deoxy-2'-fluoro
  misc_feature (15)..(17): deoxy
  misc_feature (18)..(19): 2'-deoxy-2'-fluoro
  misc_feature (20)..(21): internucleotide phosphorothioate linkage
  misc_feature (1)..(19): ribonucleotide unmodified or modified as described for this sequence
ugcugcguuagcaugaguutt

SEQ ID NO: 2076 - DNA, 21 bp, Artificial Sequence
  Synthetic
  misc_feature (1)..(2): 2'-deoxy-2'-fluoro
  misc_feature (3)..(3): deoxy
  misc_feature (4)..(5): 2'-deoxy-2'-fluoro
  misc_feature (6)..(6): deoxy
  misc_feature (7)..(7): 2'-deoxy-2'-fluoro
  misc_feature (8)..(8): deoxy
  misc_feature (9)..(10): 2'-deoxy-2'-fluoro
  misc_feature (11)..(12): deoxy
  misc_feature (13)..(13): 2'-deoxy-2'-fluoro
  misc_feature (14)..(14): deoxy
  misc_feature (15)..(15): 2'-deoxy-2'-fluoro
  misc_feature (16)..(18): deoxy
  misc_feature (19)..(19): 2'-deoxy-2'-fluoro
  misc_feature (20)..(21): internucleotide phosphorothioate linkage
  misc_feature (1)..(19): ribonucleotide unmodified or modified as described for this sequence
cugcugcguuagcaugagutt

SEQ ID NO: 2077 - DNA, 21 bp, Artificial Sequence
  Synthetic
  misc_feature (1)..(1): deoxy
  misc_feature (2)..(2): 2'-deoxy-2'-fluoro
  misc_feature (3)..(3): deoxy
  misc_feature (4)..(4): 2'-deoxy-2'-fluoro
  misc_feature (5)..(6): deoxy
  misc_feature (7)..(11): 2'-deoxy-2'-fluoro
  misc_feature (12)..(13): deoxy
  misc_feature (14)..(15): 2'-deoxy-2'-fluoro
  misc_feature (16)..(17): deoxy
  misc_feature (18)..(18): 2'-deoxy-2'-fluoro
  misc_feature (19)..(19): deoxy
  misc_feature (20)..(21): internucleotide phosphorothioate linkage
  misc_feature (1)..(19): ribonucleotide unmodified or modified as described for this sequence
augcaguucuuggucaaugtt

SEQ ID NO: 2078 - DNA, 21 bp, Artificial Sequence
  Synthetic
  misc_feature (1)..(1): 2'-deoxy-2'-fluoro
  misc_feature (2)..(2): deoxy
  misc_feature (3)..(3): 2'-deoxy-2'-fluoro
  misc_feature (4)..(4): deoxy
  misc_feature (5)..(5): 2'-deoxy-2'-fluoro
  misc_feature (6)..(7): deoxy
  misc_feature (8)..(12): 2'-deoxy-2'-fluoro
  misc_feature (13)..(14): deoxy
  misc_feature (15)..(16): 2'-deoxy-2'-fluoro
  misc_feature (17)..(18): deoxy
  misc_feature (19)..(19): 2'-deoxy-2'-fluoro
  misc_feature (20)..(21): internucleotide phosphorothioate linkage
  misc_feature (1)..(19): ribonucleotide unmodified or modified as described for this sequence
caugcaguucuuggucaautt

SEQ ID NO: 2079 - DNA, 21 bp, Artificial Sequence
  Synthetic
  misc_feature (1)..(2): 2'-deoxy-2'-fluoro
  misc_feature (3)..(3): deoxy
  misc_feature (4)..(4): 2'-deoxy-2'-fluoro
  misc_feature (5)..(5): deoxy
  misc_feature (6)..(6): 2'-deoxy-2'-fluoro
  misc_feature (7)..(8): deoxy
  misc_feature (9)..(13): 2'-deoxy-2'-fluoro
  misc_feature (14)..(15): deoxy
  misc_feature (16)..(17): 2'-deoxy-2'-fluoro
  misc_feature (18)..(19): deoxy
  misc_feature (20)..(21): internucleotide phosphorothioate linkage
  misc_feature (1)..(19): ribonucleotide unmodified or modified as described for this sequence
ccaugcaguucuuggucaatt

SEQ ID NO: 2080 - DNA, 21 bp, Artificial Sequence
  Synthetic
  misc_feature (1)..(3): 2'-deoxy-2'-fluoro
  misc_feature (4)..(4): deoxy
  misc_feature (5)..(5): 2'-deoxy-2'-fluoro
  misc_feature (6)..(6): deoxy
  misc_feature (7)..(7): 2'-deoxy-2'-fluoro
  misc_feature (8)..(9): deoxy
  misc_feature (10)..(14): 2'-deoxy-2'-fluoro
  misc_feature (15)..(16): deoxy
  misc_feature (17)..(18): 2'-deoxy-2'-fluoro
  misc_feature (19)..(19): deoxy
  misc_feature (20)..(21): internucleotide phosphorothioate linkage
  misc_feature (1)..(19): ribonucleotide unmodified or modified as described for this sequence
uccaugcaguucuuggucatt

SEQ ID NO: 2081 - DNA, 21 bp, Artificial Sequence
  Synthetic
  misc_feature (1)..(2): deoxy
  misc_feature (3)..(5): 2'-deoxy-2'-fluoro
  misc_feature (6)..(6): deoxy
  misc_feature (7)..(7): 2'-deoxy-2'-fluoro
  misc_feature (8)..(8): deoxy
  misc_feature (9)..(9): 2'-deoxy-2'-fluoro
  misc_feature (10)..(11): deoxy
  misc_feature (12)..(16): 2'-deoxy-2'-fluoro
  misc_feature (17)..(18): deoxy
  misc_feature (19)..(19): 2'-deoxy-2'-fluoro
  misc_feature (20)..(21): internucleotide phosphorothioate linkage
  misc_feature (1)..(19): ribonucleotide unmodified or modified as described for this sequence
gguccaugcaguucuuggutt

SEQ ID NO: 2082 - DNA, 21 bp, Artificial Sequence
  Synthetic
  misc_feature (1)..(1): 2'-deoxy-2'-fluoro
  misc_feature (2)..(4): deoxy
  misc_feature (5)..(7): 2'-deoxy-2'-fluoro
  misc_feature (8)..(8): deoxy
  misc_feature (9)..(9): 2'-deoxy-2'-fluoro
  misc_feature (10)..(10): deoxy
  misc_feature (11)..(11): 2'-deoxy-2'-fluoro
  misc_feature (12)..(13): deoxy
  misc_feature (14)..(18): 2'-deoxy-2'-fluoro
  misc_feature (19)..(19): deoxy
  misc_feature (20)..(21): internucleotide phosphorothioate linkage
  misc_feature (1)..(19): ribonucleotide unmodified or modified as described for this sequence
uagguccaugcaguucuugtt

SEQ ID NO: 2083 - DNA, 21 bp, Artificial Sequence
  Synthetic
  misc_feature (1)..(1): deoxy
  misc_feature (2)..(3): 2'-deoxy-2'-fluoro
  misc_feature (4)..(6): deoxy
  misc_feature (7)..(9): 2'-deoxy-2'-fluoro
  misc_feature (10)..(10): deoxy
  misc_feature (11)..(11): 2'-deoxy-2'-fluoro
  misc_feature (12)..(12): deoxy
  misc_feature (13)..(13): 2'-deoxy-2'-fluoro
  misc_feature (14)..(15): deoxy
  misc_feature (16)..(19): 2'-deoxy-2'-fluoro
  misc_feature (20)..(21): internucleotide phosphorothioate linkage
  misc_feature (1)..(19): ribonucleotide unmodified or modified as described for this sequence
guuagguccaugcaguucutt

SEQ ID NO: 2084 - DNA, 21 bp, Artificial Sequence
  Synthetic
  misc_feature (1)..(1): deoxy
  misc_feature (2)..(2): 2'-deoxy-2'-fluoro
  misc_feature (3)..(3): deoxy
  misc_feature (4)..(5): 2'-deoxy-2'-fluoro
  misc_feature (6)..(8): deoxy
  misc_feature (9)..(11): 2'-deoxy-2'-fluoro
  misc_feature (12)..(12): deoxy
  misc_feature (13)..(13): 2'-deoxy-2'-fluoro
  misc_feature (14)..(14): deoxy
  misc_feature (15)..(15): 2'-deoxy-2'-fluoro
  misc_feature (16)..(17): deoxy
  misc_feature (18)..(19): 2'-deoxy-2'-fluoro
  misc_feature (20)..(21): internucleotide phosphorothioate linkage
  misc_feature (1)..(19): ribonucleotide unmodified or modified as described for this sequence
auguuagguccaugcaguutt

SEQ ID NO: 2085 - DNA, 21 bp, Artificial Sequence
  Synthetic
  misc_feature (1)..(2): deoxy
  misc_feature (3)..(3): 2'-deoxy-2'-fluoro
  misc_feature (4)..(4): deoxy
  misc_feature (5)..(6): 2'-deoxy-2'-fluoro
  misc_feature (7)..(9): deoxy
  misc_feature (10)..(12): 2'-deoxy-2'-fluoro
  misc_feature (13)..(13): deoxy
  misc_feature (14)..(14): 2'-deoxy-2'-fluoro
  misc_feature (15)..(15): deoxy
  misc_feature (16)..(16): 2'-deoxy-2'-fluoro
  misc_feature (17)..(18): deoxy
  misc_feature (19)..(19): 2'-deoxy-2'-fluoro
  misc_feature (20)..(21): internucleotide phosphorothioate linkage
  misc_feature (1)..(19): ribonucleotide unmodified or modified as described for this sequence
aauguuagguccaugcagutt

SEQ ID NO: 2086 - DNA, 21 bp, Artificial Sequence
  Synthetic
  misc_feature (1)..(3): deoxy
  misc_feature (4)..(4): 2'-deoxy-2'-fluoro
  misc_feature (5)..(5): deoxy
  misc_feature (6)..(7): 2'-deoxy-2'-fluoro
  misc_feature (8)..(10): deoxy
  misc_feature (11)..(13): 2'-deoxy-2'-fluoro
  misc_feature (14)..(14): deoxy
  misc_feature (15)..(15): 2'-deoxy-2'-fluoro
  misc_feature (16)..(16): deoxy
  misc_feature (17)..(17): 2'-deoxy-2'-fluoro
  misc_feature (18)..(19): deoxy
  misc_feature (20)..(21): internucleotide phosphorothioate linkage
  misc_feature (1)..(19): ribonucleotide unmodified or modified as described for this sequence
gaauguuagguccaugcagtt

SEQ ID NO: 2087 - DNA, 21 bp, Artificial Sequence
  Synthetic
  misc_feature (1)..(2): 2'-deoxy-2'-fluoro
  misc_feature (3)..(5): deoxy
  misc_feature (6)..(6): 2'-deoxy-2'-fluoro
  misc_feature (7)..(7): deoxy
  misc_feature (8)..(9): 2'-deoxy-2'-fluoro
  misc_feature (10)..(12): deoxy
  misc_feature (13)..(15): 2'-deoxy-2'-fluoro
  misc_feature (16)..(16): deoxy
  misc_feature (17)..(17): 2'-deoxy-2'-fluoro
  misc_feature (18)..(18): deoxy
  misc_feature (19)..(19): 2'-deoxy-2'-fluoro
  misc_feature (20)..(21): internucleotide phosphorothioate linkage
  misc_feature (1)..(19): ribonucleotide unmodified or modified as described for this sequence
ucgaauguuagguccaugctt

SEQ ID NO: 2088 - DNA, 21 bp, Artificial Sequence
  Synthetic
  misc_feature (1)..(2): deoxy
  misc_feature (3)..(4): 2'-deoxy-2'-fluoro
  misc_feature (5)..(7): deoxy
  misc_feature (8)..(8): 2'-deoxy-2'-fluoro
  misc_feature (9)..(9): deoxy
  misc_feature (10)..(11): 2'-deoxy-2'-fluoro
  misc_feature (12)..(14): deoxy
  misc_feature (15)..(17): 2'-deoxy-2'-fluoro
  misc_feature (18)..(18): deoxy
  misc_feature (19)..(19): 2'-deoxy-2'-fluoro
  misc_feature (20)..(21): internucleotide phosphorothioate linkage
  misc_feature (1)..(19): ribonucleotide unmodified or modified as described for this sequence
gaucgaauguuagguccautt

SEQ ID NO: 2089 - DNA, 21 bp, Artificial Sequence
  Synthetic
  misc_feature (1)..(1): 5'-3 attached terminal deoxyabasic moiety
  misc_feature (1)..(1): 2'-deoxy-2'-fluoro
  misc_feature (2)..(3): 2'-O-methyl
  misc_feature (4)..(5): 2'-deoxy-2'-fluoro
  misc_feature (6)..(6): 2'-O-methyl
  misc_feature (7)..(7): 2'-deoxy-2'-fluoro
  misc_feature (8)..(9): 2'-O-methyl
  misc_feature (10)..(15): 2'-deoxy-2'-fluoro
  misc_feature (16)..(19): 2'-O-methyl
  misc_feature (1)..(19): ribonucleotide unmodified or modified as described for this sequence
  misc_feature (21)..(21): 3'-3 attached terminal deoxyabasic moiety
ugaccgcgacuuuucaaagtt

SEQ ID NO: 2090 - DNA, 21 bp, Artificial Sequence
  Synthetic
  misc_feature (1)..(1): 5'-3 attached terminal deoxyabasic moiety
  misc_feature (1)..(2): 2'-O-methyl
  misc_feature (3)..(6): 2'-deoxy-2'-fluoro
  misc_feature (7)..(8): 2'-O-methyl
  misc_feature (9)..(9): 2'-deoxy-2'-fluoro
  misc_feature (10)..(11): 2'-O-methyl
  misc_feature (12)..(15): 2'-deoxy-2'-fluoro
  misc_feature (16)..(17): 2'-O-methyl
  misc_feature (18)..(19): 2'-deoxy-2'-fluoro
  misc_feature (1)..(19): ribonucleotide unmodified or modified as described for this sequence
  misc_feature (21)..(21): 3'-3 attached terminal deoxyabasic moiety
aaccucagcaacuucaacctt

SEQ ID NO: 2091 - DNA, 21 bp, Artificial Sequence
  Synthetic
  misc_feature (1)..(1): 5'-3 attached terminal deoxyabasic moiety
  misc_feature (1)..(1): 2'-O-methyl
  misc_feature (2)..(5): 2'-deoxy-2'-fluoro
  misc_feature (6)..(7): 2'-O-methyl
  misc_feature (8)..(8): 2'-deoxy-2'-fluoro
  misc_feature (9)..(10): 2'-O-methyl
  misc_feature (11)..(14): 2'-deoxy-2'-fluoro
  misc_feature (15)..(16): 2'-O-methyl
  misc_feature (17)..(19): 2'-deoxy-2'-fluoro
  misc_feature (1)..(19): ribonucleotide unmodified or modified as described for this sequence
  misc_feature (21)..(21): 3'-3 attached terminal deoxyabasic moiety
accucagcaacuucaaccctt

SEQ ID NO: 2092 - DNA, 21 bp, Artificial Sequence
  Synthetic
  misc_feature (1)..(1): 5'-3 attached terminal deoxyabasic moiety
  misc_feature (1)..(7): 2'-O-methyl
  misc_feature (8)..(8): 2'-deoxy-2'-fluoro
  misc_feature (9)..(13): 2'-O-methyl
  misc_feature (14)..(17): 2'-deoxy-2'-fluoro
  misc_feature (18)..(19): 2'-O-methyl
  misc_feature (1)..(19): ribonucleotide unmodified or modified as described for this sequence
  misc_feature (21)..(21): 3'-3 attached terminal deoxyabasic moiety
gaaaaagugaaaaccuugatt

SEQ ID NO: 2093 - DNA, 21 bp, Artificial Sequence
  Synthetic
  misc_feature (1)..(1): 5'-3 attached terminal deoxyabasic moiety
  misc_feature (1)..(6): 2'-O-methyl
  misc_feature (7)..(7): 2'-deoxy-2'-fluoro
  misc_feature (8)..(12): 2'-O-methyl
  misc_feature (13)..(16): 2'-deoxy-2'-fluoro
  misc_feature (17)..(19): 2'-O-methyl
  misc_feature (1)..(19): ribonucleotide unmodified or modified as described for this sequence
  misc_feature (21)..(21): 3'-3 attached terminal deoxyabasic moiety
aaaaagugaaaaccuugaatt

SEQ ID NO: 2094 - DNA, 21 bp, Artificial Sequence
  Synthetic
  misc_feature (1)..(1): 5'-3 attached terminal deoxyabasic moiety
  misc_feature (1)..(1): 2'-deoxy-2'-fluoro
  misc_feature (2)..(7): 2'-O-methyl
  misc_feature (8)..(8): 2'-deoxy-2'-fluoro
  misc_feature (9)..(11): 2'-O-methyl
  misc_feature (12)..(12): 2'-deoxy-2'-fluoro
  misc_feature (13)..(14): 2'-O-methyl
  misc_feature (15)..(15): 2'-deoxy-2'-fluoro
  misc_feature (16)..(16): 2'-O-methyl
  misc_feature (17)..(17): 2'-deoxy-2'-fluoro
  misc_feature (18)..(19): 2'-O-methyl
  misc_feature (1)..(19): ribonucleotide unmodified or modified as described for this sequence
  misc_feature (21)..(21): 3'-3 attached terminal deoxyabasic moiety
cagggaacagguggcacagtt

SEQ ID NO: 2095 - DNA, 21 bp, Artificial Sequence
  Synthetic
  misc_feature (1)..(1): 5'-3 attached terminal deoxyabasic moiety
  misc_feature (1)..(6): 2'-O-methyl
  misc_feature (7)..(8): 2'-deoxy-2'-fluoro
  misc_feature (9)..(9): 2'-O-methyl
  misc_feature (10)..(10): 2'-deoxy-2'-fluoro
  misc_feature (11)..(13): 2'-O-methyl
  misc_feature (14)..(15): 2'-deoxy-2'-fluoro
  misc_feature (16)..(16): 2'-O-methyl
  misc_feature (17)..(17): 2'-deoxy-2'-fluoro
  misc_feature (18)..(18): 2'-O-methyl
  misc_feature (19)..(19): 2'-deoxy-2'-fluoro
  misc_feature (1)..(19): ribonucleotide unmodified or modified as described for this sequence
  misc_feature (21)..(21): 3'-3 attached terminal deoxyabasic moiety
agaaagucaugaaccacgutt

SEQ ID NO: 2096 - DNA, 21 bp, Artificial Sequence
  Synthetic
  misc_feature (1)..(1): 5'-3 attached terminal deoxyabasic moiety
  misc_feature (1)..(5): 2'-O-methyl
  misc_feature (6)..(7): 2'-deoxy-2'-fluoro
  misc_feature (8)..(8): 2'-O-methyl
  misc_feature (9)..(9): 2'-deoxy-2'-fluoro
  misc_feature (10)..(12): 2'-O-methyl
  misc_feature (13)..(14): 2'-deoxy-2'-fluoro
  misc_feature (15)..(15): 2'-O-methyl
  misc_feature (16)..(16): 2'-deoxy-2'-fluoro
  misc_feature (17)..(17): 2'-O-methyl
  misc_feature (18)..(19): 2'-deoxy-2'-fluoro
  misc_feature (1)..(19): ribonucleotide unmodified or modified as described for this sequence
  misc_feature (21)..(21): 3'-3 attached terminal deoxyabasic moiety
gaaagucaugaaccacguutt

SEQ ID NO: 2097 - DNA, 21 bp, Artificial Sequence
  Synthetic
  misc_feature (1)..(1): 5'-3 attached terminal deoxyabasic moiety
  misc_feature (1)..(3): 2'-O-methyl
  misc_feature (4)..(5): 2'-deoxy-2'-fluoro
  misc_feature (6)..(6): 2'-O-methyl
  misc_feature (7)..(7): 2'-deoxy-2'-fluoro
  misc_feature (8)..(10): 2'-O-methyl
  misc_feature (11)..(12): 2'-deoxy-2'-fluoro
  misc_feature (13)..(13): 2'-O-methyl
  misc_feature (14)..(14): 2'-deoxy-2'-fluoro
  misc_feature (15)..(15): 2'-O-methyl
  misc_feature (16)..(17): 2'-deoxy-2'-fluoro
  misc_feature (18)..(19): 2'-O-methyl
  misc_feature (1)..(19): ribonucleotide unmodified or modified as described for this sequence
  misc_feature (21)..(21): 3'-3 attached terminal deoxyabasic moiety
aagucaugaaccacguuaatt

SEQ ID NO: 2098 - DNA, 21 bp, Artificial Sequence
  Synthetic
  misc_feature (1)..(1): 5'-3 attached terminal deoxyabasic moiety
  misc_feature (1)..(2): 2'-deoxy-2'-fluoro
  misc_feature (3)..(3): 2'-O-methyl
  misc_feature (4)..(4): 2'-deoxy-2'-fluoro
  misc_feature (5)..(7): 2'-O-methyl
  misc_feature (8)..(9): 2'-deoxy-2'-fluoro
  misc_feature (10)..(10): 2'-O-methyl
  misc_feature (11)..(11): 2'-deoxy-2'-fluoro
  misc_feature (12)..(12): 2'-O-methyl
  misc_feature (13)..(14): 2'-deoxy-2'-fluoro
  misc_feature (15)..(16): 2'-O-methyl
  misc_feature (17)..(17): 2'-deoxy-2'-fluoro
  misc_feature (18)..(19): 2'-O-methyl
  misc_feature (1)..(19): ribonucleotide unmodified or modified as described for this sequence
  misc_feature (21)..(21): 3'-3 attached terminal deoxyabasic moiety
ucaugaaccacguuaacagtt

SEQ ID NO: 2099 - DNA, 21 bp, Artificial Sequence
  Synthetic
  misc_feature (1)..(1): 5'-3 attached terminal deoxyabasic moiety
  misc_feature (1)..(2): 2'-O-methyl
  misc_feature (3)..(3): 2'-deoxy-2'-fluoro
  misc_feature (4)..(6): 2'-O-methyl
  misc_feature (7)..(7): 2'-deoxy-2'-fluoro
  misc_feature (8)..(8): 2'-O-methyl
  misc_feature (9)..(10): 2'-deoxy-2'-fluoro
  misc_feature (11)..(12): 2'-O-methyl
  misc_feature (13)..(15): 2'-deoxy-2'-fluoro
  misc_feature (16)..(16): 2'-O-methyl
  misc_feature (17)..(17): 2'-deoxy-2'-fluoro
  misc_feature (18)..(18): 2'-O-methyl
  misc_feature (19)..(19): 2'-deoxy-2'-fluoro
  misc_feature (1)..(19): ribonucleotide unmodified or modified as described for this sequence
  misc_feature (21)..(21): 3'-3 attached terminal deoxyabasic moiety
agugggugccaacucaugctt

SEQ ID NO: 2100 - DNA, 21 bp, Artificial Sequence
  Synthetic
  misc_feature (1)..(1): 5'-3 attached terminal deoxyabasic moiety
  misc_feature (1)..(1): 2'-deoxy-2'-fluoro
  misc_feature (2)..(2): 2'-O-methyl
  misc_feature (3)..(4): 2'-deoxy-2'-fluoro
  misc_feature (5)..(6): 2'-O-methyl
  misc_feature (7)..(9): 2'-deoxy-2'-fluoro
  misc_feature (10)..(10): 2'-O-methyl
  misc_feature (11)..(11): 2'-deoxy-2'-fluoro
  misc_feature (12)..(12): 2'-O-methyl
  misc_feature (13)..(14): 2'-deoxy-2'-fluoro
  misc_feature (15)..(16): 2'-O-methyl
  misc_feature (17)..(17): 2'-deoxy-2'-fluoro
  misc_feature (18)..(18): 2'-O-methyl
  misc_feature (19)..(19): 2'-deoxy-2'-fluoro
  misc_feature (1)..(19): ribonucleotide unmodified or modified as described for this sequence
  misc_feature (21)..(21): 3'-3 attached terminal deoxyabasic moiety
ugccaacucaugcuaacgctt

SEQ ID NO: 2101 - DNA, 21 bp, Artificial Sequence
  Synthetic
  misc_feature (1)..(1): 5'-3 attached terminal deoxyabasic moiety
  misc_feature (1)..(1): 2'-O-methyl
  misc_feature (2)..(3): 2'-deoxy-2'-fluoro
  misc_feature (4)..(5): 2'-O-methyl
  misc_feature (6)..(8): 2'-deoxy-2'-fluoro
  misc_feature (9)..(9): 2'-O-methyl
  misc_feature (10)..(10): 2'-deoxy-2'-fluoro
  misc_feature (11)..(11): 2'-O-methyl
  misc_feature (12)..(13): 2'-deoxy-2'-fluoro
  misc_feature (14)..(15): 2'-O-methyl
  misc_feature (16)..(16): 2'-deoxy-2'-fluoro
  misc_feature (17)..(17): 2'-O-methyl
  misc_feature (18)..(18): 2'-deoxy-2'-fluoro
  misc_feature (19)..(19): 2'-O-methyl
  misc_feature (1)..(19): ribonucleotide unmodified or modified as described for this sequence
  misc_feature (21)..(21): 3'-3 attached terminal deoxyabasic moiety
gccaacucaugcuaacgcatt

SEQ ID NO: 2102 - DNA, 21 bp, Artificial Sequence
  Synthetic
  misc_feature (1)..(1): 5'-3 attached terminal deoxyabasic moiety
  misc_feature (1)..(1): 2'-deoxy-2'-fluoro
  misc_feature (2)..(3): 2'-O-methyl
  misc_feature (4)..(6): 2'-deoxy-2'-fluoro
  misc_feature (7)..(7): 2'-O-methyl
  misc_feature (8)..(8): 2'-deoxy-2'-fluoro
  misc_feature (9)..(9): 2'-O-methyl
  misc_feature (10)..(11): 2'-deoxy-2'-fluoro
  misc_feature (12)..(13): 2'-O-methyl
  misc_feature (14)..(14): 2'-deoxy-2'-fluoro
  misc_feature (15)..(15): 2'-O-methyl
  misc_feature (16)..(16): 2'-deoxy-2'-fluoro
  misc_feature (17)..(18): 2'-O-methyl
  misc_feature (19)..(19): 2'-deoxy-2'-fluoro
  misc_feature (1)..(19): ribonucleotide unmodified or modified as described for this sequence
  misc_feature (21)..(21): 3'-3 attached terminal deoxyabasic moiety
caacucaugcuaacgcagctt

SEQ ID NO: 2103 - DNA, 21 bp, Artificial Sequence
  Synthetic
  misc_feature (1)..(1): 5'-3 attached terminal deoxyabasic moiety
  misc_feature (1)..(2): 2'-O-methyl
  misc_feature (3)..(5): 2'-deoxy-2'-fluoro
  misc_feature (6)..(6): 2'-O-methyl
  misc_feature (7)..(7): 2'-deoxy-2'-fluoro
  misc_feature (8)..(8): 2'-O-methyl
  misc_feature (9)..(10): 2'-deoxy-2'-fluoro
  misc_feature (11)..(12): 2'-O-methyl
  misc_feature (13)..(13): 2'-deoxy-2'-fluoro
  misc_feature (14)..(14): 2'-O-methyl
  misc_feature (15)..(15): 2'-deoxy-2'-fluoro
  misc_feature (16)..(17): 2'-O-methyl
  misc_feature (18)..(18): 2'-deoxy-2'-fluoro
  misc_feature (19)..(19): 2'-O-methyl
  misc_feature (1)..(19): ribonucleotide unmodified or modified as described for this sequence
  misc_feature (21)..(21): 3'-3 attached terminal deoxyabasic moiety
aacucaugcuaacgcagcatt

SEQ ID NO: 2104 - DNA, 21 bp, Artificial Sequence
  Synthetic
  misc_feature (1)..(1): 5'-3 attached terminal deoxyabasic moiety
  misc_feature (1)..(1): 2'-O-methyl
  misc_feature (2)..(4): 2'-deoxy-2'-fluoro
  misc_feature (5)..(5): 2'-O-methyl
  misc_feature (6)..(6): 2'-deoxy-2'-fluoro
  misc_feature (7)..(7): 2'-O-methyl
  misc_feature (8)..(9): 2'-deoxy-2'-fluoro
  misc_feature (10)..(11): 2'-O-methyl
  misc_feature (12)..(12): 2'-deoxy-2'-fluoro
  misc_feature (13)..(13): 2'-O-methyl
  misc_feature (14)..(14): 2'-deoxy-2'-fluoro
  misc_feature (15)..(16): 2'-O-methyl
  misc_feature (17)..(17): 2'-deoxy-2'-fluoro
  misc_feature (18)..(19): 2'-O-methyl
  misc_feature (1)..(19): ribonucleotide unmodified or modified as described for this sequence
  misc_feature (21)..(21): 3'-3 attached terminal deoxyabasic moiety
acucaugcuaacgcagcagtt

SEQ ID NO: 2105 - DNA, 21 bp, Artificial Sequence
  Synthetic
  misc_feature (1)..(1): 5'-3 attached terminal deoxyabasic moiety
  misc_feature (1)..(1): 2'-deoxy-2'-fluoro
  misc_feature (2)..(2): 2'-O-methyl
  misc_feature (3)..(4): 2'-deoxy-2'-fluoro
  misc_feature (5)..(6): 2'-O-methyl
  misc_feature (7)..(8): 2'-deoxy-2'-fluoro
  misc_feature (9)..(13): 2'-O-methyl
  misc_feature (14)..(15): 2'-deoxy-2'-fluoro
  misc_feature (16)..(16): 2'-O-methyl
  misc_feature (17)..(17): 2'-deoxy-2'-fluoro
  misc_feature (18)..(18): 2'-O-methyl
  misc_feature (19)..(19): 2'-deoxy-2'-fluoro
  misc_feature (1)..(19): ribonucleotide unmodified or modified as described for this sequence
  misc_feature (21)..(21): 3'-3 attached terminal deoxyabasic moiety
cauugaccaagaacugcautt

SEQ ID NO: 2106 - DNA, 21 bp, Artificial Sequence
  Synthetic
  misc_feature (1)..(1): 5'-3 attached terminal deoxyabasic moiety
  misc_feature (1)..(1): 2'-O-methyl
  misc_feature (2)..(3): 2'-deoxy-2'-fluoro
  misc_feature (4)..(5): 2'-O-methyl
  misc_feature (6)..(7): 2'-deoxy-2'-fluoro
  misc_feature (8)..(12): 2'-O-methyl
  misc_feature (13)..(14): 2'-deoxy-2'-fluoro
  misc_feature (15)..(15): 2'-O-methyl
  misc_feature (16)..(16): 2'-deoxy-2'-fluoro
  misc_feature (17)..(17): 2'-O-methyl
  misc_feature (18)..(18): 2'-deoxy-2'-fluoro
  misc_feature (19)..(19): 2'-O-methyl
  misc_feature (21)..(21): 3'-3 attached terminal deoxyabasic moiety
  misc_feature (1)..(19): ribonucleotide unmodified or modified as described for this sequence
auugaccaagaacugcaugtt

SEQ ID NO: 2107 - DNA, 21 bp, Artificial Sequence
  Synthetic
  misc_feature (1)..(1): 5'-3 attached terminal deoxyabasic moiety
  misc_feature (1)..(2): 2'-deoxy-2'-fluoro
  misc_feature (3)..(4): 2'-O-methyl
  misc_feature (5)..(6): 2'-deoxy-2'-fluoro
  misc_feature (7)..(11): 2'-O-methyl
  misc_feature (12)..(13): 2'-deoxy-2'-fluoro
  misc_feature (14)..(14): 2'-O-methyl
  misc_feature (15)..(15): 2'-deoxy-2'-fluoro
  misc_feature (16)..(16): 2'-O-methyl
  misc_feature (17)..(17): 2'-deoxy-2'-fluoro
  misc_feature (18)..(19): 2'-O-methyl
  misc_feature (21)..(21): 3'-3 attached terminal deoxyabasic moiety
  misc_feature (1)..(19): ribonucleotide unmodified or modified as described for this sequence
uugaccaagaacugcauggtt

SEQ ID NO: 2108 - DNA, 21 bp, Artificial Sequence
  Synthetic
  misc_feature (1)..(1): 5'-3 attached terminal deoxyabasic moiety
  misc_feature (1)..(1): 2'-deoxy-2'-fluoro
  misc_feature (2)..(3): 2'-O-methyl
  misc_feature (4)..(5): 2'-deoxy-2'-fluoro
  misc_feature (6)..(10): 2'-O-methyl
  misc_feature (11)..(12): 2'-deoxy-2'-fluoro
  misc_feature (13)..(13): 2'-O-methyl
  misc_feature (14)..(14): 2'-deoxy-2'-fluoro
  misc_feature (15)..(15): 2'-O-methyl
  misc_feature (16)..(16): 2'-deoxy-2'-fluoro
  misc_feature (17)..(19): 2'-O-methyl
  misc_feature (21)..(21): 3'-3 attached terminal deoxyabasic moiety
  misc_feature (1)..(19): ribonucleotide unmodified or modified as described for this sequence
ugaccaagaacugcauggatt

SEQ ID NO: 2109 - DNA, 21 bp, Artificial Sequence
  Synthetic
  misc_feature (1)..(1): 5'-3 attached terminal deoxyabasic moiety
  misc_feature (1)..(1): 2'-O-methyl
  misc_feature (2)..(3): 2'-deoxy-2'-fluoro
  misc_feature (4)..(8): 2'-O-methyl
  misc_feature (9)..(10): 2'-deoxy-2'-fluoro
  misc_feature (11)..(11): 2'-O-methyl
  misc_feature (12)..(12): 2'-deoxy-2'-fluoro
  misc_feature (13)..(13): 2'-O-methyl
  misc_feature (14)..(14): 2'-deoxy-2'-fluoro
  misc_feature (15)..(17): 2'-O-methyl
  misc_feature (18)..(19): 2'-deoxy-2'-fluoro
  misc_feature (21)..(21): 3'-3 attached terminal deoxyabasic moiety
  misc_feature (1)..(19): ribonucleotide unmodified or modified as described for this sequence
accaagaacugcauggacctt

SEQ ID NO: 2110 - DNA, 21 bp, Artificial Sequence
  Synthetic
  misc_feature (1)..(1): 5'-3 attached terminal deoxyabasic moiety
  misc_feature (1)..(1): 2'-deoxy-2'-fluoro
  misc_feature (2)..(6): 2'-O-methyl
  misc_feature (7)..(8): 2'-deoxy-2'-fluoro
  misc_feature (9)..(9): 2'-O-methyl
  misc_feature (10)..(10): 2'-deoxy-2'-fluoro
  misc_feature (11)..(11): 2'-O-methyl
  misc_feature (12)..(12): 2'-deoxy-2'-fluoro
  misc_feature (13)..(15): 2'-O-methyl
  misc_feature (16)..(18): 2'-deoxy-2'-fluoro
  misc_feature (19)..(19): 2'-O-methyl
  misc_feature (21)..(21): 3'-3 attached terminal deoxyabasic moiety
  misc_feature (1)..(19): ribonucleotide unmodified or modified as described for this sequence
caagaacugcauggaccuatt

SEQ ID NO: 2111 - DNA, 21 bp, Artificial Sequence
  Synthetic
  misc_feature (1)..(1): 5'-3 attached terminal deoxyabasic moiety
  misc_feature (1)..(4): 2'-O-methyl
  misc_feature (5)..(6): 2'-deoxy-2'-fluoro
  misc_feature (7)..(7): 2'-O-methyl
  misc_feature (8)..(8): 2'-deoxy-2'-fluoro
  misc_feature (9)..(9): 2'-O-methyl
  misc_feature (10)..(10): 2'-deoxy-2'-fluoro
  misc_feature (11)..(13): 2'-O-methyl
  misc_feature (14)..(16): 2'-deoxy-2'-fluoro
  misc_feature (17)..(18): 2'-O-methyl
  misc_feature (19)..(19): 2'-deoxy-2'-fluoro
  misc_feature (21)..(21): 3'-3 attached terminal deoxyabasic moiety
  misc_feature (1)..(19): ribonucleotide unmodified or modified as described for this sequence
agaacugcauggaccuaactt

SEQ ID NO: 2112 - DNA, 21 bp, Artificial Sequence
  Synthetic
  misc_feature (1)..(1): 5'-3 attached terminal deoxyabasic moiety
  misc_feature (1)..(2): 2'-O-methyl
  misc_feature (3)..(4): 2'-deoxy-2'-fluoro
  misc_feature (5)..(5): 2'-O-methyl
  misc_feature (6)..(6): 2'-deoxy-2'-fluoro
  misc_feature (7)..(7): 2'-O-methyl
  misc_feature (8)..(8): 2'-deoxy-2'-fluoro
  misc_feature (9)..(11): 2'-O-methyl
  misc_feature (12)..(14): 2'-deoxy-2'-fluoro
  misc_feature (15)..(16): 2'-O-methyl
  misc_feature (17)..(17): 2'-deoxy-2'-fluoro
  misc_feature (18)..(18): 2'-O-methyl
  misc_feature (19)..(19): 2'-deoxy-2'-fluoro
  misc_feature (21)..(21): 3'-3 attached terminal deoxyabasic moiety
  misc_feature (1)..(19): ribonucleotide unmodified or modified as described for this sequence
aacugcauggaccuaacautt

SEQ ID NO: 2113 - DNA, 21 bp, Artificial Sequence
  Synthetic
  misc_feature (1)..(1): 5'-3 attached terminal deoxyabasic moiety
  misc_feature (1)..(1): 2'-O-methyl
  misc_feature (2)..(3): 2'-deoxy-2'-fluoro
  misc_feature (4)..(4): 2'-O-methyl
  misc_feature (5)..(5): 2'-deoxy-2'-fluoro
  misc_feature (6)..(6): 2'-O-methyl
  misc_feature (7)..(7): 2'-deoxy-2'-fluoro
  misc_feature (8)..(10): 2'-O-methyl
  misc_feature (11)..(13): 2'-deoxy-2'-fluoro
  misc_feature (14)..(15): 2'-O-methyl
  misc_feature (16)..(16): 2'-deoxy-2'-fluoro
  misc_feature (17)..(17): 2'-O-methyl
  misc_feature (18)..(19): 2'-deoxy-2'-fluoro
  misc_feature (21)..(21): 3'-3 attached terminal deoxyabasic moiety
  misc_feature (1)..(19): ribonucleotide unmodified or modified as described for this sequence
acugcauggaccuaacauutt

SEQ ID NO: 2114 - DNA, 21 bp, Artificial Sequence
  Synthetic
  misc_feature (1)..(1): 5'-3 attached terminal deoxyabasic moiety
  misc_feature (1)..(2): 2'-deoxy-2'-fluoro
  misc_feature (3)..(3): 2'-O-methyl
  misc_feature (4)..(4): 2'-deoxy-2'-fluoro
  misc_feature (5)..(5): 2'-O-methyl
  misc_feature (6)..(6): 2'-deoxy-2'-fluoro
  misc_feature (7)..(9): 2'-O-methyl
  misc_feature (10)..(12): 2'-deoxy-2'-fluoro
  misc_feature (13)..(14): 2'-O-methyl
  misc_feature (15)..(15): 2'-deoxy-2'-fluoro
  misc_feature (16)..(16): 2'-O-methyl
  misc_feature (17)..(19): 2'-deoxy-2'-fluoro
  misc_feature (21)..(21): 3'-3 attached terminal deoxyabasic moiety
  misc_feature (1)..(19): ribonucleotide unmodified or modified as described for this sequence
cugcauggaccuaacauuctt

SEQ ID NO: 2115 - DNA, 21 bp, Artificial Sequence
  Synthetic
  misc_feature (1)..(1): 5'-3 attached terminal deoxyabasic moiety
  misc_feature (1)..(1): 2'-O-methyl
  misc_feature (2)..(2): 2'-deoxy-2'-fluoro
  misc_feature (3)..(3): 2'-O-methyl
  misc_feature (4)..(4): 2'-deoxy-2'-fluoro
  misc_feature (5)..(7): 2'-O-methyl
  misc_feature (8)..(10): 2'-deoxy-2'-fluoro
  misc_feature (11)..(12): 2'-O-methyl
  misc_feature (13)..(13): 2'-deoxy-2'-fluoro
  misc_feature (14)..(14): 2'-O-methyl
  misc_feature (15)..(17): 2'-deoxy-2'-fluoro
  misc_feature (18)..(19): 2'-O-methyl
  misc_feature (21)..(21): 3'-3 attached terminal deoxyabasic moiety
  misc_feature (1)..(19): ribonucleotide unmodified or modified as described for this sequence
gcauggaccuaacauucgatt

SEQ ID NO: 2116 - DNA, 21 bp, Artificial Sequence
  Synthetic
  misc_feature (1)..(1): 5'-3 attached terminal deoxyabasic moiety
  misc_feature (2)..(2): 2'-deoxy-2'-fluoro
  misc_feature (6)..(8): 2'-deoxy-2'-fluoro
  misc_feature (11)..(11): 2'-deoxy-2'-fluoro
  misc_feature (13)..(15): 2'-deoxy-2'-fluoro
  misc_feature (18)..(19): 2'-deoxy-2'-fluoro
  misc_feature (21)..(21): 3'-3 attached terminal deoxyabasic moiety
  misc_feature (1)..(19): ribonucleotide unmodified or modified as described for this sequence
auggaccuaacauucgauctt

SEQ ID NO: 2117 - DNA, 21 bp, Artificial Sequence
  Synthetic
  misc_feature (1)..(4): 2'-deoxy-2'-fluoro
  misc_feature (5)..(10): 2'-O-methyl
  misc_feature (11)..(12): 2'-deoxy-2'-fluoro
  misc_feature (13)..(13): 2'-O-methyl
  misc_feature (14)..(14): 2'-deoxy-2'-fluoro
  misc_feature (15)..(16): 2'-O-methyl
  misc_feature (17)..(18): 2'-deoxy-2'-fluoro
  misc_feature (19)..(19): 2'-O-methyl
  misc_feature (20)..(21): internucleotide phosphorothioate linkage
  misc_feature (1)..(19): ribonucleotide unmodified or modified as described for this sequence
cuuugaaaagucgcggucatt

SEQ ID NO: 2118 - DNA, 21 bp, Artificial Sequence
  Synthetic
  misc_feature (1)..(2): 2'-O-methyl
  misc_feature (3)..(4): 2'-deoxy-2'-fluoro
  misc_feature (5)..(8): 2'-O-methyl
  misc_feature (9)..(10): 2'-deoxy-2'-fluoro
  misc_feature (11)..(11): 2'-O-methyl
  misc_feature (12)..(13): 2'-deoxy-2'-fluoro
  misc_feature (14)..(17): 2'-O-methyl
  misc_feature (18)..(19): 2'-deoxy-2'-fluoro
  misc_feature (20)..(21): internucleotide phosphorothioate linkage
  misc_feature (1)..(19): ribonucleotide unmodified or modified as described for this sequence
gguugaaguugcugagguutt

SEQ ID NO: 2119 - DNA, 21 bp, Artificial Sequence
  Synthetic
  misc_feature (1)..(3): 2'-O-methyl
  misc_feature (4)..(5): 2'-deoxy-2'-fluoro
  misc_feature (6)..(9): 2'-O-methyl
  misc_feature (10)..(11): 2'-deoxy-2'-fluoro
  misc_feature (12)..(12): 2'-O-methyl
  misc_feature (13)..(14): 2'-deoxy-2'-fluoro
  misc_feature (15)..(18): 2'-O-methyl
  misc_feature (19)..(19): 2'-deoxy-2'-fluoro
  misc_feature (20)..(21): internucleotide phosphorothioate linkage
  misc_feature (1)..(19): ribonucleotide unmodified or modified as described for this sequence
ggguugaaguugcugaggutt

SEQ ID NO: 2120 - DNA, 21 bp, Artificial Sequence
  Synthetic
  misc_feature (1)..(2): 2'-deoxy-2'-fluoro
  misc_feature (3)..(6): 2'-O-methyl
  misc_feature (7)..(11): 2'-deoxy-2'-fluoro
  misc_feature (12)..(12): 2'-O-methyl
  misc_feature (13)..(19): 2'-deoxy-2'-fluoro
  misc_feature (20)..(21): internucleotide phosphorothioate linkage
  misc_feature (1)..(19): ribonucleotide unmodified or modified as described for this sequence
ucaagguuuucacuuuuuctt

SEQ ID NO: 2121 - DNA, 21 bp, Artificial Sequence
  Synthetic
  misc_feature (1)..(3): 2'-deoxy-2'-fluoro
  misc_feature (4)..(7): 2'-O-methyl
  misc_feature (8)..(12): 2'-deoxy-2'-fluoro
  misc_feature (13)..(13): 2'-O-methyl
  misc_feature (14)..(19): 2'-deoxy-2'-fluoro
  misc_feature (20)..(21): internucleotide phosphorothioate linkage
  misc_feature (1)..(19): ribonucleotide unmodified or modified as described for this sequence
uucaagguuuucacuuuuutt

SEQ ID NO: 2122 - DNA, 21 bp, Artificial Sequence
  Synthetic
  misc_feature (1)..(2): 2'-deoxy-2'-fluoro
  misc_feature (1)..(1): 2'-deoxy-2'-fluoro
  misc_feature (3)..(3): 2'-O-methyl
  misc_feature (5)..(5): 2'-O-methyl
  misc_feature (6)..(7): 2'-deoxy-2'-fluoro
  misc_feature (8)..(8): 2'-O-methyl
  misc_feature (9)..(11): 2'-deoxy-2'-fluoro
  misc_feature (12)..(12): 2'-O-methyl
  misc_feature (13)..(18): 2'-deoxy-2'-fluoro
  misc_feature (19)..(19): 2'-O-methyl
  misc_feature (20)..(21): internucleotide phosphorothioate linkage
  misc_feature (1)..(19): ribonucleotide unmodified or modified as described for this sequence
cugugccaccuguucccugtt

SEQ ID NO: 2123 - DNA, 21 bp, Artificial Sequence
  Synthetic
  misc_feature (1)..(1): 2'-O-methyl
  misc_feature (2)..(2): 2'-deoxy-2'-fluoro
  misc_feature (3)..(3): 2'-O-methyl
  misc_feature (4)..(4): 2'-deoxy-2'-fluoro
  misc_feature (5)..(6): 2'-O-methyl
  misc_feature (7)..(9): 2'-deoxy-2'-fluoro
  misc_feature (10)..(10): 2'-O-methyl
  misc_feature (11)..(11): 2'-deoxy-2'-fluoro
  misc_feature (12)..(13): 2'-O-methyl
  misc_feature (14)..(19): 2'-deoxy-2'-fluoro
  misc_feature (20)..(21): internucleotide phosphorothioate linkage
  misc_feature (1)..(19): ribonucleotide unmodified or modified as described for this sequence
acgugguucaugacuuucutt

SEQ ID NO: 2124 - DNA, 21 bp, Artificial Sequence
  Synthetic
  misc_feature (1)..(2): 2'-O-methyl
  misc_feature (3)..(3): 2'-deoxy-2'-fluoro
  misc_feature (4)..(4): 2'-O-methyl
  misc_feature (5)..(5): 2'-deoxy-2'-fluoro
  misc_feature (6)..(7): 2'-O-methyl
  misc_feature (8)..(10): 2'-deoxy-2'-fluoro
  misc_feature (11)..(11): 2'-O-methyl
  misc_feature (12)..(12): 2'-deoxy-2'-fluoro
  misc_feature (13)..(14): 2'-O-methyl
  misc_feature (15)..(19): 2'-deoxy-2'-fluoro
  misc_feature (20)..(21): internucleotide phosphorothioate linkage
  misc_feature (1)..(19): ribonucleotide unmodified or modified as described for this sequence
aacgugguucaugacuuuctt

SEQ ID NO: 2125 - DNA, 21 bp, Artificial Sequence
  Synthetic
  misc_feature (1)..(2): 2'-deoxy-2'-fluoro
  misc_feature (3)..(4): 2'-O-methyl
  misc_feature (5)..(5): 2'-deoxy-2'-fluoro
  misc_feature (6)..(6): 2'-O-methyl
  misc_feature (7)..(7): 2'-deoxy-2'-fluoro
  misc_feature (8)..(9): 2'-O-methyl
  misc_feature (10)..(12): 2'-deoxy-2'-fluoro
  misc_feature (13)..(13): 2'-O-methyl
  misc_feature (14)..(14): 2'-deoxy-2'-fluoro
  misc_feature (15)..(16): 2'-O-methyl
  misc_feature (17)..(19): 2'-deoxy-2'-fluoro
  misc_feature (20)..(21): internucleotide phosphorothioate linkage
  misc_feature (1)..(19): ribonucleotide unmodified or modified as described for this sequence
uuaacgugguucaugacuutt

SEQ ID NO: 2126 - DNA, 21 bp, Artificial Sequence
  Synthetic
  misc_feature (1)..(2): 2'-deoxy-2'-fluoro
  misc_feature (3)..(3): 2'-O-methyl
  misc_feature (4)..(5): 2'-deoxy-2'-fluoro
  misc_feature (6)..(7): 2'-O-methyl
  misc_feature (8)..(8): 2'-deoxy-2'-fluoro
  misc_feature (9)..(9): 2'-O-methyl
  misc_feature (10)..(10): 2'-deoxy-2'-fluoro
  misc_feature (11)..(12): 2'-O-methyl
  misc_feature (13)..(15): 2'-deoxy-2'-fluoro
  misc_feature (16)..(16): 2'-O-methyl
  misc_feature (17)..(17): 2'-deoxy-2'-fluoro
  misc_feature (18)..(19): 2'-O-methyl
  misc_feature (20)..(21): internucleotide phosphorothioate linkage
  misc_feature (1)..(19): ribonucleotide unmodified or modified as described for this sequence
cuguuaacgugguucaugatt

SEQ ID NO: 2127 - DNA, 21 bp, Artificial Sequence
  Synthetic
  misc_feature (1)..(1): 2'-O-methyl
  misc_feature (2)..(2): 2'-deoxy-2'-fluoro
  misc_feature (3)..(3): 2'-O-methyl
  misc_feature (4)..(4): 2'-deoxy-2'-fluoro
  misc_feature (5)..(7): 2'-O-methyl
  misc_feature (8)..(9): 2'-deoxy-2'-fluoro
  misc_feature (10)..(11): 2'-O-methyl
  misc_feature (12)..(12): 2'-deoxy-2'-fluoro
  misc_feature (13)..(13): 2'-O-methyl
  misc_feature (14)..(16): 2'-deoxy-2'-fluoro
  misc_feature (17)..(17): 2'-O-methyl
  misc_feature (18)..(19): 2'-deoxy-2'-fluoro
  misc_feature (20)..(21): internucleotide phosphorothioate linkage
  misc_feature (1)..(19): ribonucleotide unmodified or modified as described for this sequence
gcaugaguuggcacccacutt

SEQ ID NO: 2128 - DNA, 21 bp, Artificial Sequence
  Synthetic
  misc_feature (1)..(1): 2'-O-methyl
  misc_feature (2)..(2): 2'-deoxy-2'-fluoro
  misc_feature (3)..(3): 2'-O-methyl
  misc_feature (4)..(5): 2'-deoxy-2'-fluoro
  misc_feature (6)..(7): 2'-O-methyl
  misc_feature (8)..(8): 2'-deoxy-2'-fluoro
  misc_feature (9)..(9): 2'-O-methyl
  misc_feature (10)..(10): 2'-deoxy-2'-fluoro
  misc_feature (11)..(13): 2'-O-methyl
  misc_feature (14)..(15): 2'-deoxy-2'-fluoro
  misc_feature (16)..(17): 2'-O-methyl
  misc_feature (18)..(18): 2'-deoxy-2'-fluoro
  misc_feature (19)..(19): 2'-O-methyl
  misc_feature (20)..(21): internucleotide phosphorothioate linkage
  misc_feature (1)..(19): ribonucleotide unmodified or modified as described for this sequence
gcguuagcaugaguuggcatt

SEQ ID NO: 2129 - DNA, 21 bp, Artificial Sequence
  Synthetic
  misc_feature (1)..(1): 2'-deoxy-2'-fluoro
  misc_feature (2)..(2): 2'-O-methyl
  misc_feature (3)..(3): 2'-deoxy-2'-fluoro
  misc_feature (4)..(4): 2'-O-methyl
  misc_feature (5)..(6): 2'-deoxy-2'-fluoro
  misc_feature (7)..(8): 2'-O-methyl
  misc_feature (9)..(9): 2'-deoxy-2'-fluoro
  misc_feature (10)..(10): 2'-O-methyl
  misc_feature (11)..(11): 2'-deoxy-2'-fluoro
  misc_feature (12)..(14): 2'-O-methyl
  misc_feature (15)..(16): 2'-deoxy-2'-fluoro
  misc_feature (17)..(18): 2'-O-methyl
  misc_feature (19)..(19): 2'-deoxy-2'-fluoro
  misc_feature (20)..(21): internucleotide phosphorothioate linkage
  misc_feature (1)..(19): ribonucleotide unmodified or modified as described for this sequence
ugcguuagcaugaguuggctt

SEQ ID NO: 2130 - DNA, 21 bp, Artificial Sequence
  Synthetic
  misc_feature (1)..(1): 2'-O-methyl
  misc_feature (2)..(3): 2'-deoxy-2'-fluoro
  misc_feature (4)..(4): 2'-O-methyl
  misc_feature (5)..(5): 2'-deoxy-2'-fluoro
  misc_feature (6)..(6): 2'-O-methyl
  misc_feature (7)..(8): 2'-deoxy-2'-fluoro
  misc_feature (9)..(10): 2'-O-methyl
  misc_feature (11)..(11): 2'-deoxy-2'-fluoro
  misc_feature (12)..(12): 2'-O-methyl
  misc_feature (13)..(13): 2'-deoxy-2'-fluoro
  misc_feature (14)..(16): 2'-O-methyl
  misc_feature (17)..(18): 2'-deoxy-2'-fluoro
  misc_feature (19)..(19): 2'-O-methyl
  misc_feature (20)..(21): internucleotide phosphorothioate linkage
  misc_feature (1)..(19): ribonucleotide unmodified or modified as described for this sequence
gcugcguuagcaugaguugtt

SEQ ID NO: 2131 - DNA, 21 bp, Artificial Sequence
  Synthetic
  misc_feature (1)..(1): 2'-deoxy-2'-fluoro
  misc_feature (2)..(2): 2'-O-methyl
  misc_feature (3)..(4): 2'-deoxy-2'-fluoro
  misc_feature (5)..(5): 2'-O-methyl
  misc_feature (6)..(6): 2'-deoxy-2'-fluoro
  misc_feature (7)..(7): 2'-O-methyl
  misc_feature (8)..(9): 2'-deoxy-2'-fluoro
  misc_feature (10)..(11): 2'-O-methyl
  misc_feature (12)..(12): 2'-deoxy-2'-fluoro
  misc_feature (13)..(13): 2'-O-methyl
  misc_feature (14)..(14): 2'-deoxy-2'-fluoro
  misc_feature (15)..(17): 2'-O-methyl
  misc_feature (18)..(19): 2'-deoxy-2'-fluoro
  misc_feature (20)..(21): internucleotide phosphorothioate linkage
  misc_feature (1)..(19): ribonucleotide unmodified or modified as described for this sequence
ugcugcguuagcaugaguutt

SEQ ID NO: 2132 - DNA, 21 bp, Artificial Sequence
  Synthetic
  misc_feature (1)..(2): 2'-deoxy-2'-fluoro
  misc_feature (3)..(3): 2'-O-methyl
  misc_feature (4)..(5): 2'-deoxy-2'-fluoro
  misc_feature (6)..(6): 2'-O-methyl
  misc_feature (7)..(7): 2'-deoxy-2'-fluoro
  misc_feature (8)..(8): 2'-O-methyl
  misc_feature (9)..(10): 2'-deoxy-2'-fluoro
  misc_feature (11)..(12): 2'-O-methyl
  misc_feature (13)..(13): 2'-deoxy-2'-fluoro
  misc_feature (14)..(14): 2'-O-methyl
  misc_feature (15)..(15): 2'-deoxy-2'-fluoro
  misc_feature (16)..(18): 2'-O-methyl
  misc_feature (19)..(19): 2'-deoxy-2'-fluoro
  misc_feature (20)..(21): internucleotide phosphorothioate linkage
  misc_feature (1)..(19): ribonucleotide unmodified or modified as described for this sequence
cugcugcguuagcaugagutt

SEQ ID NO: 2133 - DNA, 21 bp, Artificial Sequence
  Synthetic
  misc_feature (1)..(1): 2'-O-methyl
  misc_feature (2)..(2): 2'-deoxy-2'-fluoro
  misc_feature (3)..(3): 2'-O-methyl
  misc_feature (4)..(4): 2'-deoxy-2'-fluoro
  misc_feature (5)..(6): 2'-O-methyl
  misc_feature (7)..(11): 2'-deoxy-2'-fluoro
  misc_feature (12)..(13): 2'-O-methyl
  misc_feature (14)..(15): 2'-deoxy-2'-fluoro
  misc_feature (16)..(17): 2'-O-methyl
  misc_feature (18)..(18): 2'-deoxy-2'-fluoro
  misc_feature (19)..(19): 2'-O-methyl
  misc_feature (20)..(21): internucleotide phosphorothioate linkage
  misc_feature (1)..(19): ribonucleotide unmodified or modified as described for this sequence
augcaguucuuggucaaugtt

SEQ ID NO: 2134 - DNA, 21 bp, Artificial Sequence
  Synthetic
  misc_feature (1)..(1): 2'-deoxy-2'-fluoro
  misc_feature (2)..(2): 2'-O-methyl
  misc_feature (3)..(3): 2'-deoxy-2'-fluoro
  misc_feature (4)..(4): 2'-O-methyl
  misc_feature (5)..(5): 2'-deoxy-2'-fluoro
  misc_feature (6)..(7): 2'-O-methyl
  misc_feature (8)..(12): 2'-deoxy-2'-fluoro
  misc_feature (13)..(14): 2'-O-methyl
  misc_feature (15)..(16): 2'-deoxy-2'-fluoro
  misc_feature (17)..(18): 2'-O-methyl
  misc_feature (19)..(19): 2'-deoxy-2'-fluoro
  misc_feature (20)..(21): internucleotide phosphorothioate linkage
  misc_feature (1)..(19): ribonucleotide unmodified or modified as described for this sequence
caugcaguucuuggucaautt

SEQ ID NO: 2135 - DNA, 21 bp, Artificial Sequence
  Synthetic
  misc_feature (1)..(2): 2'-deoxy-2'-fluoro
  misc_feature (3)..(3): 2'-O-methyl
  misc_feature (4)..(4): 2'-deoxy-2'-fluoro
  misc_feature (5)..(5): 2'-O-methyl
  misc_feature (6)..(6): 2'-deoxy-2'-fluoro
  misc_feature (7)..(8): 2'-O-methyl
  misc_feature (9)..(13): 2'-deoxy-2'-fluoro
  misc_feature (14)..(15): 2'-O-methyl
  misc_feature (16)..(17): 2'-deoxy-2'-fluoro
  misc_feature (18)..(19): 2'-O-methyl
  misc_feature (20)..(21): internucleotide phosphorothioate linkage
  misc_feature (1)..(19): ribonucleotide unmodified or modified as described for this sequence
ccaugcaguucuuggucaatt

SEQ ID NO: 2136 - DNA, 21 bp, Artificial Sequence
  Synthetic
  misc_feature (1)..(3): 2'-deoxy-2'-fluoro
  misc_feature (4)..(4): 2'-O-methyl
  misc_feature (5)..(5): 2'-deoxy-2'-fluoro
  misc_feature (6)..(6): 2'-O-methyl
  misc_feature (7)..(7): 2'-deoxy-2'-fluoro
  misc_feature (8)..(9): 2'-O-methyl
  misc_feature (10)..(14): 2'-deoxy-2'-fluoro
  misc_feature (15)..(16): 2'-O-methyl
  misc_feature (17)..(18): 2'-deoxy-2'-fluoro
  misc_feature (19)..(19): 2'-O-methyl
  misc_feature (20)..(21): internucleotide phosphorothioate linkage
  misc_feature (1)..(19): ribonucleotide unmodified or modified as described for this sequence
uccaugcaguucuuggucatt

SEQ ID NO: 2137 - DNA, 21 bp, Artificial Sequence
  Synthetic
  misc_feature (1)..(2): 2'-O-methyl
  misc_feature (3)..(5): 2'-deoxy-2'-fluoro
  misc_feature (6)..(6): 2'-O-methyl
  misc_feature (7)..(7): 2'-deoxy-2'-fluoro
  misc_feature (8)..(8): 2'-O-methyl
  misc_feature (9)..(9): 2'-deoxy-2'-fluoro
  misc_feature (10)..(11): 2'-O-methyl
  misc_feature (12)..(16): 2'-deoxy-2'-fluoro
  misc_feature (17)..(18): 2'-O-methyl
  misc_feature (19)..(19): 2'-deoxy-2'-fluoro
  misc_feature (20)..(21): internucleotide phosphorothioate linkage
  misc_feature (1)..(19): ribonucleotide unmodified or modified as described for this sequence
gguccaugcaguucuuggutt

SEQ ID NO: 2138 - DNA, 21 bp, Artificial Sequence
  Synthetic
  misc_feature (1)..(1): 2'-deoxy-2'-fluoro
  misc_feature (2)..(4): 2'-O-methyl
  misc_feature (5)..(7): 2'-deoxy-2'-fluoro
  misc_feature (8)..(8): 2'-O-methyl
  misc_feature (9)..(9): 2'-deoxy-2'-fluoro
  misc_feature (10)..(10): 2'-O-methyl
  misc_feature (11)..(11): 2'-deoxy-2'-fluoro
  misc_feature (12)..(13): 2'-O-methyl
  misc_feature (14)..(18): 2'-deoxy-2'-fluoro
  misc_feature (19)..(19): 2'-O-methyl
  misc_feature (20)..(21): internucleotide phosphorothioate linkage
  misc_feature (1)..(19): ribonucleotide unmodified or modified as described for this sequence
uagguccaugcaguucuugtt

SEQ ID NO: 2139 - DNA, 21 bp, Artificial Sequence
  Synthetic
  misc_feature (1)..(1): 2'-O-methyl
  misc_feature (2)..(3): 2'-deoxy-2'-fluoro
  misc_feature (4)..(6): 2'-O-methyl
  misc_feature (7)..(9): 2'-deoxy-2'-fluoro
  misc_feature (10)..(10): 2'-O-methyl
  misc_feature (11)..(11): 2'-deoxy-2'-fluoro
  misc_feature (12)..(12): 2'-O-methyl
  misc_feature (13)..(13): 2'-deoxy-2'-fluoro
  misc_feature (14)..(15): 2'-O-methyl
  misc_feature (16)..(19): 2'-deoxy-2'-fluoro
  misc_feature (20)..(21): internucleotide phosphorothioate linkage
  misc_feature (1)..(19): ribonucleotide unmodified or modified as described for this sequence
guuagguccaugcaguucutt

SEQ ID NO: 2140 - DNA, 21 bp, Artificial Sequence
  Synthetic
  misc_feature (1)..(1): 2'-O-methyl
  misc_feature (2)..(2): 2'-deoxy-2'-fluoro
  misc_feature (3)..(3): 2'-O-methyl
  misc_feature (4)..(5): 2'-deoxy-2'-fluoro
  misc_feature (6)..(8): 2'-O-methyl
  misc_feature (8)..(11): 2'-deoxy-2'-fluoro
  misc_feature (12)..(12): 2'-O-methyl
  misc_feature (13)..(13): 2'-deoxy-2'-fluoro
  misc_feature (14)..(14): 2'-O-methyl
  misc_feature (15)..(15): 2'-deoxy-2'-fluoro
  misc_feature (16)..(17): 2'-O-methyl
  misc_feature (18)..(19): 2'-deoxy-2'-fluoro
  misc_feature (20)..(21): internucleotide phosphorothioate linkage
  misc_feature (1)..(19): ribonucleotide unmodified or modified as described for this sequence
auguuagguccaugcaguutt

SEQ ID NO: 2141 - DNA, 21 bp, Artificial Sequence
  Synthetic
  misc_feature (1)..(2): 2'-O-methyl
  misc_feature (3)..(3): 2'-deoxy-2'-fluoro
  misc_feature (4)..(4): 2'-O-methyl
  misc_feature (5)..(6): 2'-deoxy-2'-fluoro
  misc_feature (7)..(9): 2'-O-methyl
  misc_feature (10)..(12): 2'-deoxy-2'-fluoro
  misc_feature (13)..(13): 2'-O-methyl
  misc_feature (14)..(14): 2'-deoxy-2'-fluoro
  misc_feature (15)..(15): 2'-O-methyl
  misc_feature (16)..(16): 2'-deoxy-2'-fluoro
  misc_feature (17)..(18): 2'-O-methyl
  misc_feature (19)..(19): 2'-deoxy-2'-fluoro
  misc_feature (20)..(21): internucleotide phosphorothioate linkage
  misc_feature (1)..(19): ribonucleotide unmodified or modified as described for this sequence
aauguuagguccaugcagutt

SEQ ID NO: 2142 - DNA, 21 bp, Artificial Sequence
  Synthetic
  misc_feature (1)..(3): 2'-O-methyl
  misc_feature (4)..(4): 2'-deoxy-2'-fluoro
  misc_feature (5)..(5): 2'-O-methyl
  misc_feature (6)..(7): 2'-deoxy-2'-fluoro
  misc_feature (8)..(10): 2'-O-methyl
  misc_feature (11)..(13): 2'-deoxy-2'-fluoro
  misc_feature (14)..(14): 2'-O-methyl
  misc_feature (15)..(15): 2'-deoxy-2'-fluoro
  misc_feature (16)..(16): 2'-O-methyl
  misc_feature (17)..(17): 2'-deoxy-2'-fluoro
  misc_feature (18)..(19): 2'-O-methyl
  misc_feature (20)..(21): internucleotide phosphorothioate linkage
  misc_feature (1)..(19): ribonucleotide unmodified or modified as described for this sequence
gaauguuagguccaugcagtt

SEQ ID NO: 2143 - DNA, 21 bp, Artificial Sequence
  Synthetic
  misc_feature (1)..(2): 2'-deoxy-2'-fluoro
  misc_feature (3)..(5): 2'-O-methyl
  misc_feature (6)..(6): 2'-deoxy-2'-fluoro
  misc_feature (7)..(7): 2'-O-methyl
  misc_feature (8)..(9): 2'-deoxy-2'-fluoro
  misc_feature (10)..(12): 2'-O-methyl
  misc_feature (13)..(15): 2'-deoxy-2'-fluoro
  misc_feature (16)..(16): 2'-O-methyl
  misc_feature (17)..(17): 2'-deoxy-2'-fluoro
  misc_feature (18)..(18): 2'-O-methyl
  misc_feature (19)..(19): 2'-deoxy-2'-fluoro
  misc_feature (20)..(21): internucleotide phosphorothioate linkage
  misc_feature (1)..(19): ribonucleotide unmodified or modified as described for this sequence
ucgaauguuagguccaugctt

SEQ ID NO: 2144 - DNA, 21 bp, Artificial Sequence
  Synthetic
  misc_feature (1)..(2): 2'-O-methyl
  misc_feature (3)..(4): 2'-deoxy-2'-fluoro
  misc_feature (5)..(7): 2'-O-methyl
  misc_feature (8)..(8): 2'-deoxy-2'-fluoro
  misc_feature (9)..(9): 2'-O-methyl
  misc_feature (10)..(11): 2'-deoxy-2'-fluoro
  misc_feature (12)..(14): 2'-O-methyl
  misc_feature (15)..(17): 2'-deoxy-2'-fluoro
  misc_feature (18)..(18): 2'-O-methyl
  misc_feature (19)..(19): 2'-deoxy-2'-fluoro
  misc_feature (20)..(21): internucleotide phosphorothioate linkage
  misc_feature (1)..(19): ribonucleotide unmodified or modified as described for this sequence
gaucgaauguuagguccautt

SEQ ID NO: 2145 - DNA, 21 bp, Artificial Sequence
  Synthetic
  misc_feature (1)..(1): 5'-3 attached terminal deoxyabasic moiety
  misc_feature (1)..(19): ribonucleotide unmodified or modified as described for this sequence
  misc_feature (21)..(21): 3'-3 attached terminal deoxyabasic moiety
ugaccgcgacuuuucaaagtt

SEQ ID NO: 2146 - DNA, 21 bp, Artificial Sequence
  Synthetic
  misc_feature (1)..(1): 5'-3 attached terminal deoxyabasic moiety
  misc_feature (1)..(19): ribonucleotide unmodified or modified as described for this sequence
  misc_feature (21)..(21): 3'-3 attached terminal deoxyabasic moiety
aaccucagcaacuucaacctt

SEQ ID NO: 2147 - DNA, 21 bp, Artificial Sequence
  Synthetic
  misc_feature (1)..(1): 5'-3 attached terminal deoxyabasic moiety
  misc_feature (1)..(19): ribonucleotide unmodified or modified as described for this sequence
  misc_feature (21)..(21): 3'-3 attached terminal deoxyabasic moiety
accucagcaacuucaaccctt

SEQ ID NO: 2148 - DNA, 21 bp, Artificial Sequence
  Synthetic
  misc_feature (1)..(1): 5'-3 attached terminal deoxyabasic moiety
  misc_feature (1)..(19): ribonucleotide unmodified or modified as described for this sequence
  misc_feature (21)..(21): 3'-3 attached terminal deoxyabasic moiety
gaaaaagugaaaaccuugatt

SEQ ID NO: 2149 - DNA, 21 bp, Artificial Sequence
  Synthetic
  misc_feature (1)..(1): 5'-3 attached terminal deoxyabasic moiety
  misc_feature (1)..(19): ribonucleotide unmodified or modified as described for this sequence
  misc_feature (21)..(21): 3'-3 attached terminal deoxyabasic moiety
aaaaagugaaaaccuugaatt

SEQ ID NO: 2150 - DNA, 21 bp, Artificial Sequence
  Synthetic
  misc_feature (1)..(1): 5'-3 attached terminal deoxyabasic moiety
  misc_feature (1)..(19): ribonucleotide unmodified or modified as described for this sequence
  misc_feature (21)..(21): 3'-3 attached terminal deoxyabasic moiety
cagggaacagguggcacagtt

SEQ ID NO: 2151 - DNA, 21 bp, Artificial Sequence
  Synthetic
  misc_feature (1)..(1): 5'-3 attached terminal deoxyabasic moiety
  misc_feature (1)..(19): ribonucleotide unmodified or modified as described for this sequence
  misc_feature (21)..(21): 3'-3 attached terminal deoxyabasic moiety
agaaagucaugaaccacgutt

SEQ ID NO: 2152 - DNA, 21 bp, Artificial Sequence
  Synthetic
  misc_feature (1)..(1): 5'-3 attached terminal deoxyabasic moiety
  misc_feature (1)..(19): ribonucleotide unmodified or modified as described for this sequence
  misc_feature (21)..(21): 3'-3 attached terminal deoxyabasic moiety
gaaagucaugaaccacguutt

SEQ ID NO: 2153 - DNA, 21 bp, Artificial Sequence
  Synthetic
  misc_feature (1)..(1): 5'-3 attached terminal deoxyabasic moiety
  misc_feature (1)..(19): ribonucleotide unmodified or modified as described for this sequence
  misc_feature (21)..(21): 3'-3 attached terminal deoxyabasic moiety
aagucaugaaccacguuaatt

SEQ ID NO: 2154 - DNA, 21 bp, Artificial Sequence
  Synthetic
  misc_feature (1)..(1): 5'-3 attached terminal deoxyabasic moiety
  misc_feature (1)..(19): ribonucleotide unmodified or modified as described for this sequence
  misc_feature (21)..(21): 3'-3 attached terminal deoxyabasic moiety
ucaugaaccacguuaacagtt

SEQ ID NO: 2155 - DNA, 21 bp, Artificial Sequence
  Synthetic
  misc_feature (1)..(1): 5'-3 attached terminal deoxyabasic moiety
  misc_feature (1)..(19): ribonucleotide unmodified or modified as described for this sequence
  misc_feature (21)..(21): 3'-3 attached terminal deoxyabasic moiety
agugggugccaacucaugctt

SEQ ID NO: 2156 - DNA, 21 bp, Artificial Sequence
  Synthetic
  misc_feature (1)..(1): 5'-3 attached terminal deoxyabasic moiety
  misc_feature (1)..(19): ribonucleotide unmodified or modified as described for this sequence
  misc_feature (21)..(21): 3'-3 attached terminal deoxyabasic moiety
ugccaacucaugcuaacgctt

SEQ ID NO: 2157 - DNA, 21 bp, Artificial Sequence
  Synthetic
  misc_feature (1)..(1): 5'-3 attached terminal deoxyabasic moiety
  misc_feature (1)..(19): ribonucleotide unmodified or modified as described for this sequence
  misc_feature (21)..(21): 3'-3 attached terminal deoxyabasic moiety
gccaacucaugcuaacgcatt

SEQ ID NO: 2158 - DNA, 21 bp, Artificial Sequence
  Synthetic
  misc_feature (1)..(1): 5'-3 attached terminal deoxyabasic moiety
  misc_feature (1)..(19): ribonucleotide unmodified or modified as described for this sequence
  misc_feature (21)..(21): 3'-3 attached terminal deoxyabasic moiety
caacucaugcuaacgcagctt

SEQ ID NO: 2159 - DNA, 21 bp, Artificial Sequence
  Synthetic
  misc_feature (1)..(1): 5'-3 attached terminal deoxyabasic moiety
  misc_feature (1)..(19): ribonucleotide unmodified or modified as described for this sequence
  misc_feature (21)..(21): 3'-3 attached terminal deoxyabasic moiety
aacucaugcuaacgcagcatt

SEQ ID NO: 2160 - DNA, 21 bp, Artificial Sequence
  Synthetic
  misc_feature (1)..(1): 5'-3 attached terminal deoxyabasic moiety
  misc_feature (1)..(19): ribonucleotide unmodified or modified as described for this sequence
  misc_feature (21)..(21): 3'-3 attached terminal deoxyabasic moiety
acucaugcuaacgcagcagtt

SEQ ID NO: 2161 - DNA, 21 bp, Artificial Sequence
  Synthetic
  misc_feature (1)..(1): 5'-3 attached terminal deoxyabasic moiety
  misc_feature (1)..(19): ribonucleotide unmodified or modified as described for this sequence
  misc_feature (21)..(21): 3'-3 attached terminal deoxyabasic moiety
cauugaccaagaacugcautt

SEQ ID NO: 2162 - DNA, 21 bp, Artificial Sequence
  Synthetic
  misc_feature (1)..(1): 5'-3 attached terminal deoxyabasic moiety
  misc_feature (1)..(19): ribonucleotide unmodified or modified as described for this sequence
  misc_feature (21)..(21): 3'-3 attached terminal deoxyabasic moiety
auugaccaagaacugcaugtt

SEQ ID NO: 2163 - DNA, 21 bp, Artificial Sequence
  Synthetic
  misc_feature (1)..(1): 5'-3 attached terminal deoxyabasic moiety
  misc_feature (1)..(19): ribonucleotide unmodified or modified as described for this sequence
  misc_feature (21)..(21): 3'-3 attached terminal deoxyabasic moiety
uugaccaagaacugcauggtt

SEQ ID NO: 2164 - DNA, 21 bp, Artificial Sequence
  Synthetic
  misc_feature (1)..(1): 5'-3 attached terminal deoxyabasic moiety
  misc_feature (1)..(19): ribonucleotide unmodified or modified as described for this sequence
  misc_feature (21)..(21): 3'-3 attached terminal deoxyabasic moiety
ugaccaagaacugcauggatt

SEQ ID NO: 2165 - DNA, 21 bp, Artificial Sequence
  Synthetic
  misc_feature (1)..(1): 5'-3 attached terminal deoxyabasic moiety
  misc_feature (1)..(19): ribonucleotide unmodified or modified as described for this sequence
  misc_feature (21)..(21): 3'-3 attached terminal deoxyabasic moiety
accaagaacugcauggacctt

SEQ ID NO: 2166 - DNA, 21 bp, Artificial Sequence
  Synthetic
  misc_feature (1)..(1): 5'-3 attached terminal deoxyabasic moiety
  misc_feature (1)..(19): ribonucleotide unmodified or modified as described for this sequence
  misc_feature (21)..(21): 3'-3 attached terminal deoxyabasic moiety
caagaacugcauggaccuatt

SEQ ID NO: 2167 - DNA, 21 bp, Artificial Sequence
  Synthetic
  misc_feature (1)..(1): 5'-3 attached terminal deoxyabasic moiety
  misc_feature (1)..(19): ribonucleotide unmodified or modified as described for this sequence
  misc_feature (21)..(21): 3'-3 attached terminal deoxyabasic moiety
agaacugcauggaccuaactt

SEQ ID NO: 2168 - DNA, 21 bp, Artificial Sequence
  Synthetic
  misc_feature (1)..(1): 5'-3 attached terminal deoxyabasic moiety
  misc_feature (1)..(19): ribonucleotide unmodified or modified as described for this sequence
  misc_feature (21)..(21): 3'-3 attached terminal deoxyabasic moiety
aacugcauggaccuaacautt

SEQ ID NO: 2169 - DNA, 21 bp, Artificial Sequence
  Synthetic
  misc_feature (1)..(1): 5'-3 attached terminal deoxyabasic moiety
  misc_feature (1)..(19): ribonucleotide unmodified or modified as described for this sequence
  misc_feature (21)..(21): 3'-3 attached terminal deoxyabasic moiety
acugcauggaccuaacauutt

SEQ ID NO: 2170 - DNA, 21 bp, Artificial Sequence
  Synthetic
  misc_feature (1)..(1): 5'-3 attached terminal deoxyabasic moiety
  misc_feature (21)..(21): 3'-3 attached terminal deoxyabasic moiety
  misc_feature (1)..(19): ribonucleotide unmodified or modified as described for this sequence
cugcauggaccuaacauuctt

SEQ ID NO: 2171 - DNA, 21 bp, Artificial Sequence
  Synthetic
  misc_feature (1)..(1): 5'-3 attached terminal deoxyabasic moiety
  misc_feature (21)..(21): 3'-3 attached terminal deoxyabasic moiety
  misc_feature (1)..(19): ribonucleotide unmodified or modified as described for this sequence
gcauggaccuaacauucgatt

SEQ ID NO: 2172 - DNA, 21 bp, Artificial Sequence
  Synthetic
  misc_feature (1)..(1): 5'-3 attached terminal deoxyabasic moiety
  misc_feature (21)..(21): 3'-3 attached terminal deoxyabasic moiety
  misc_feature (1)..(19): ribonucleotide unmodified or modified as described for this sequence
auggaccuaacauucgauctt

SEQ ID NO: 2173 - DNA, 21 bp, Artificial Sequence
  Synthetic
  misc_feature (20)..(21): internucleotide phosphorothioate linkage
  misc_feature (1)..(19): ribonucleotide unmodified or modified as described for this sequence
cuuugaaaagucgcggucatt

SEQ ID NO: 2174 - DNA, 21 bp, Artificial Sequence
  Synthetic
  misc_feature (20)..(21): internucleotide phosphorothioate linkage
  misc_feature (1)..(19): ribonucleotide unmodified or modified as described for this sequence
gguugaaguugcugagguutt

SEQ ID NO: 2175 - DNA, 21 bp, Artificial Sequence
  Synthetic
  misc_feature (20)..(21): internucleotide phosphorothioate linkage
  misc_feature (1)..(19): ribonucleotide unmodified or modified as described for this sequence
ggguugaaguugcugaggutt

SEQ ID NO: 2176 - DNA, 21 bp, Artificial Sequence
  Synthetic
  misc_feature (20)..(21): internucleotide phosphorothioate linkage
  misc_feature (1)..(19): ribonucleotide unmodified or modified as described for this sequence
ucaagguuuucacuuuuuctt

SEQ ID NO: 2177 - DNA, 21 bp, Artificial Sequence
  Synthetic
  misc_feature (20)..(21): internucleotide phosphorothioate linkage
  misc_feature (1)..(19): ribonucleotide unmodified or modified as described for this sequence
uucaagguuuucacuuuuutt

SEQ ID NO: 2178 - DNA, 21 bp, Artificial Sequence
  Synthetic
  misc_feature (20)..(21): internucleotide phosphorothioate linkage
  misc_feature (1)..(19): ribonucleotide unmodified or modified as described for this sequence
cugugccaccuguucccugtt

SEQ ID NO: 2179 - DNA, 21 bp, Artificial Sequence
  Synthetic
  misc_feature (20)..(21): internucleotide phosphorothioate linkage
  misc_feature (1)..(19): ribonucleotide unmodified or modified as described for this sequence
acgugguucaugacuuucutt

SEQ ID NO: 2180 - DNA, 21 bp, Artificial Sequence
  Synthetic
  misc_feature (20)..(21): internucleotide phosphorothioate linkage
  misc_feature (1)..(19): ribonucleotide unmodified or modified as described for this sequence
aacgugguucaugacuuuctt

SEQ ID NO: 2181 - DNA, 21 bp, Artificial Sequence
  Synthetic
  misc_feature (20)..(21): internucleotide phosphorothioate linkage
  misc_feature (1)..(19): ribonucleotide unmodified or modified as described for this sequence
uuaacgugguucaugacuutt

SEQ ID NO: 2182 - DNA, 21 bp, Artificial Sequence
  Synthetic
  misc_feature (20)..(21): internucleotide phosphorothioate linkage
  misc_feature (1)..(19): ribonucleotide unmodified or modified as described for this sequence
cuguuaacgugguucaugatt

SEQ ID NO: 2183 - DNA, 21 bp, Artificial Sequence
  Synthetic
  misc_feature (20)..(21): internucleotide phosphorothioate linkage
  misc_feature (1)..(19): ribonucleotide unmodified or modified as described for this sequence
gcaugaguuggcacccacutt

SEQ ID NO: 2184 - DNA, 21 bp, Artificial Sequence
  Synthetic
  misc_feature (20)..(21): internucleotide phosphorothioate linkage
  misc_feature (1)..(19): ribonucleotide unmodified or modified as described for this sequence
gcguuagcaugaguuggcatt

SEQ ID NO: 2185 - DNA, 21 bp, Artificial Sequence
  Synthetic
  misc_feature (20)..(21): internucleotide phosphorothioate linkage
  misc_feature (1)..(19): ribonucleotide unmodified or modified as described for this sequence
ugcguuagcaugaguuggctt

SEQ ID NO: 2186 - DNA, 21 bp, Artificial Sequence
  Synthetic
  misc_feature (20)..(21): internucleotide phosphorothioate linkage
  misc_feature (1)..(19): ribonucleotide unmodified or modified as described for this sequence
gcugcguuagcaugaguugtt

SEQ ID NO: 2187 - DNA, 21 bp, Artificial Sequence
  Synthetic
  misc_feature (20)..(21): internucleotide phosphorothioate linkage
  misc_feature (1)..(19): ribonucleotide unmodified or modified as described for this sequence
ugcugcguuagcaugaguutt

SEQ ID NO: 2188 - DNA, 21 bp, Artificial Sequence
  Synthetic
  misc_feature (20)..(21): internucleotide phosphorothioate linkage
  misc_feature (1)..(19): ribonucleotide unmodified or modified as described for this sequence
cugcugcguuagcaugagutt

SEQ ID NO: 2189 - DNA, 21 bp, Artificial Sequence
  Synthetic
  misc_feature (20)..(21): internucleotide phosphorothioate linkage
  misc_feature (1)..(19): ribonucleotide unmodified or modified as described for this sequence
augcaguucuuggucaaugtt

SEQ ID NO: 2190 - DNA, 21 bp, Artificial Sequence
  Synthetic
  misc_feature (20)..(21): internucleotide phosphorothioate linkage
  misc_feature (1)..(19): ribonucleotide unmodified or modified as described for this sequence
caugcaguucuuggucaautt

SEQ ID NO: 2191 - DNA, 21 bp, Artificial Sequence
  Synthetic
  misc_feature (20)..(21): internucleotide phosphorothioate linkage
  misc_feature (1)..(19): ribonucleotide unmodified or modified as described for this sequence
ccaugcaguucuuggucaatt

SEQ ID NO: 2192 - DNA, 21 bp, Artificial Sequence
  Synthetic
  misc_feature (20)..(21): internucleotide phosphorothioate linkage
  misc_feature (1)..(19): ribonucleotide unmodified or modified as described for this sequence
uccaugcaguucuuggucatt

SEQ ID NO: 2193 - DNA, 21 bp, Artificial Sequence
  Synthetic
  misc_feature (20)..(21)
  misc_feature (1)..(19): ribonucleotide unmodified or modified as described for this sequence
gguccaugcaguucuuggutt

SEQ ID NO: 2194 - DNA, 21 bp, Artificial Sequence
  Synthetic
  misc_feature (20)..(21): internucleotide phosphorothioate linkage
  misc_feature (1)..(19): ribonucleotide unmodified or modified as described for this sequence
uagguccaugcaguucuugtt

SEQ ID NO: 2195 - DNA, 21 bp, Artificial Sequence
  Synthetic
  misc_feature (20)..(21): internucleotide phosphorothioate linkage
  misc_feature (1)..(19): ribonucleotide unmodified or modified as described for this sequence
guuagguccaugcaguucutt

SEQ ID NO: 2196 - DNA, 21 bp, Artificial Sequence
  Synthetic
  misc_feature (20)..(21): internucleotide phosphorothioate linkage
  misc_feature (1)..(19): ribonucleotide unmodified or modified as described for this sequence
auguuagguccaugcaguutt

SEQ ID NO: 2197 - DNA, 21 bp, Artificial Sequence
  Synthetic
  misc_feature (20)..(21): internucleotide phosphorothioate linkage
  misc_feature (1)..(19): ribonucleotide unmodified or modified as described for this sequence
aauguuagguccaugcagutt

SEQ ID NO: 2198 - DNA, 21 bp, Artificial Sequence
  Synthetic
  misc_feature (20)..(21): internucleotide phosphorothioate linkage
  misc_feature (1)..(19): ribonucleotide unmodified or modified as described for this sequence
gaauguuagguccaugcagtt

SEQ ID NO: 2199 - DNA, 21 bp, Artificial Sequence
  Synthetic
  misc_feature (20)..(21): internucleotide phosphorothioate linkage
  misc_feature (1)..(19): ribonucleotide unmodified or modified as described for this sequence
ucgaauguuagguccaugctt

SEQ ID NO: 2200 - DNA, 21 bp, Artificial Sequence
  Synthetic
  misc_feature (20)..(21): internucleotide phosphorothioate linkage
  misc_feature (1)..(19): ribonucleotide unmodified or modified as described for this sequence
gaucgaauguuagguccautt

SEQ ID NO: 2201 - DNA, 21 bp, Artificial Sequence
  Synthetic
  misc_feature (1)..(4): 2'-deoxy-2'-fluoro
  misc_feature (5)..(10): 2'-O-methyl
  misc_feature (11)..(12): 2'-deoxy-2'-fluoro
  misc_feature (13)..(13): 2'-O-methyl
  misc_feature (14)..(14): 2'-deoxy-2'-fluoro
  misc_feature (15)..(16): 2'-O-methyl
  misc_feature (17)..(18): 2'-deoxy-2'-fluoro
  misc_feature (19)..(19): 2'-O-methyl
  misc_feature (1)..(19): ribonucleotide unmodified or modified as described for this sequence
  misc_feature (21)..(21): 3'-3 attached terminal deoxyabasic moiety
cuuugaaaagucgcggucatt

SEQ ID NO: 2202 - DNA, 21 bp, Artificial Sequence
  Synthetic
  misc_feature (1)..(2): 2'-O-methyl
  misc_feature (3)..(4): 2'-deoxy-2'-fluoro
  misc_feature (5)..(8): 2'-O-methyl
  misc_feature (9)..(10): 2'-deoxy-2'-fluoro
  misc_feature (11)..(11): 2'-O-methyl
  misc_feature (12)..(13): 2'-deoxy-2'-fluoro
  misc_feature (14)..(17): 2'-O-methyl
  misc_feature (18)..(19): 2'-deoxy-2'-fluoro
  misc_feature (1)..(19): ribonucleotide unmodified or modified as described for this sequence
  misc_feature (21)..(21): 3'-3 attached terminal deoxyabasic moiety
gguugaaguugcugagguutt

SEQ ID NO: 2203 - DNA, 21 bp, Artificial Sequence
  Synthetic
  misc_feature (1)..(3): 2'-O-methyl
  misc_feature (4)..(5): 2'-deoxy-2'-fluoro
  misc_feature (6)..(9): 2'-O-methyl
  misc_feature (10)..(11): 2'-deoxy-2'-fluoro
  misc_feature (12)..(12): 2'-O-methyl
  misc_feature (13)..(14): 2'-deoxy-2'-fluoro
  misc_feature (15)..(18): 2'-O-methyl
  misc_feature (19)..(19): 2'-deoxy-2'-fluoro
  misc_feature (1)..(19): ribonucleotide unmodified or modified as described for this sequence
  misc_feature (21)..(21): 3'-3 attached terminal deoxyabasic moiety
ggguugaaguugcugaggutt

SEQ ID NO: 2204 - DNA, 21 bp, Artificial Sequence
  Synthetic
  misc_feature (1)..(2): 2'-deoxy-2'-fluoro
  misc_feature (3)..(6): 2'-O-methyl
  misc_feature (7)..(11): 2'-deoxy-2'-fluoro
  misc_feature (12)..(12): 2'-O-methyl
  misc_feature (13)..(19): 2'-deoxy-2'-fluoro
  misc_feature (1)..(19): ribonucleotide unmodified or modified as described for this sequence
  misc_feature (21)..(21): 3'-3 attached terminal deoxyabasic moiety
ucaagguuuucacuuuuuctt

SEQ ID NO: 2205 - DNA, 21 bp, Artificial Sequence
  Synthetic
  misc_feature (1)..(3): 2'-deoxy-2'-fluoro
  misc_feature (4)..(7): 2'-O-methyl
  misc_feature (8)..(12): 2'-deoxy-2'-fluoro
  misc_feature (13)..(13): 2'-O-methyl
  misc_feature (14)..(19): 2'-deoxy-2'-fluoro
  misc_feature (1)..(19): ribonucleotide unmodified or modified as described for this sequence
  misc_feature (21)..(21): 3'-3 attached terminal deoxyabasic moiety
uucaagguuuucacuuuuutt

SEQ ID NO: 2206 - DNA, 21 bp, Artificial Sequence
  Synthetic
  misc_feature (1)..(2): 2'-deoxy-2'-fluoro
  misc_feature (3)..(3): 2'-O-methyl
  misc_feature (4)..(4): 2'-deoxy-2'-fluoro
  misc_feature (5)..(5): 2'-O-methyl
  misc_feature (6)..(7): 2'-deoxy-2'-fluoro
  misc_feature (8)..(11): 2'-deoxy-2'-fluoro
  misc_feature (8)..(8): 2'-O-methyl
  misc_feature (12)..(12): 2'-O-methyl
  misc_feature (13)..(18): 2'-deoxy-2'-fluoro
  misc_feature (19)..(19): 2'-O-methyl
  misc_feature (1)..(19): ribonucleotide unmodified or modified as described for this sequence
  misc_feature (21)..(21): 3'-3 attached terminal deoxyabasic moiety
cugugccaccuguucccugtt

SEQ ID NO: 2207 - DNA, 21 bp, Artificial Sequence
  Synthetic
  misc_feature (1)..(1): 2'-O-methyl
  misc_feature (2)..(2): 2'-deoxy-2'-fluoro
  misc_feature (3)..(3): 2'-O-methyl
  misc_feature (4)..(4): 2'-deoxy-2'-fluoro
  misc_feature (5)..(6): 2'-O-methyl
  misc_feature (7)..(9): 2'-deoxy-2'-fluoro
  misc_feature (10)..(10): 2'-O-methyl
  misc_feature (11)..(11): 2'-deoxy-2'-fluoro
  misc_feature (12)..(13): 2'-O-methyl
  misc_feature (14)..(19): 2'-deoxy-2'-fluoro
  misc_feature (1)..(19): ribonucleotide unmodified or modified as described for this sequence
  misc_feature (21)..(21): 3'-3 attached terminal deoxyabasic moiety
acgugguucaugacuuucutt

SEQ ID NO: 2208 - DNA, 21 bp, Artificial Sequence
  Synthetic
  misc_feature (1)..(2): 2'-O-methyl
  misc_feature (3)..(3): 2'-deoxy-2'-fluoro
  misc_feature (4)..(4): 2'-O-methyl
  misc_feature (5)..(5): 2'-deoxy-2'-fluoro
  misc_feature (6)..(7): 2'-O-methyl
  misc_feature (8)..(10): 2'-deoxy-2'-fluoro
  misc_feature (11)..(11): 2'-O-methyl
  misc_feature (12)..(12): 2'-deoxy-2'-fluoro
  misc_feature (13)..(14): 2'-O-methyl
  misc_feature (15)..(19): 2'-deoxy-2'-fluoro
  misc_feature (1)..(19): ribonucleotide unmodified or modified as described for this sequence
  misc_feature (21)..(21): 3'-3 attached terminal deoxyabasic moiety
aacgugguucaugacuuuctt

SEQ ID NO: 2209 - DNA, 21 bp, Artificial Sequence
  Synthetic
  misc_feature (1)..(2): 2'-deoxy-2'-fluoro
  misc_feature (3)..(4): 2'-O-methyl
  misc_feature (5)..(5): 2'-deoxy-2'-fluoro
  misc_feature (6)..(6): 2'-O-methyl
  misc_feature (7)..(7): 2'-deoxy-2'-fluoro
  misc_feature (8)..(9): 2'-O-methyl
  misc_feature (10)..(12): 2'-deoxy-2'-fluoro
  misc_feature (13)..(13): 2'-O-methyl
  misc_feature (14)..(14): 2'-deoxy-2'-fluoro
  misc_feature (15)..(16): 2'-O-methyl
  misc_feature (17)..(19): 2'-deoxy-2'-fluoro
  misc_feature (1)..(19): ribonucleotide unmodified or modified as described for this sequence
  misc_feature (21)..(21): 3'-3 attached terminal deoxyabasic moiety
uuaacgugguucaugacuutt

SEQ ID NO: 2210 - DNA, 21 bp, Artificial Sequence
  Synthetic
  misc_feature (1)..(2): 2'-deoxy-2'-fluoro
  misc_feature (3)..(3): 2'-O-methyl
  misc_feature (4)..(5): 2'-deoxy-2'-fluoro
  misc_feature (6)..(7): 2'-O-methyl
  misc_feature (8)..(8): 2'-deoxy-2'-fluoro
  misc_feature (9)..(9): 2'-O-methyl
  misc_feature (10)..(10): 2'-deoxy-2'-fluoro
  misc_feature (11)..(12): 2'-O-methyl
  misc_feature (13)..(15): 2'-deoxy-2'-fluoro
  misc_feature (16)..(16): 2'-O-methyl
  misc_feature (17)..(17): 2'-deoxy-2'-fluoro
  misc_feature (18)..(19): 2'-O-methyl
  misc_feature (1)..(19): ribonucleotide unmodified or modified as described for this sequence
  misc_feature (21)..(21): 3'-3 attached terminal deoxyabasic moiety
cuguuaacgugguucaugatt

SEQ ID NO: 2211 - DNA, 21 bp, Artificial Sequence
  Synthetic
  misc_feature (1)..(1): 2'-O-methyl
  misc_feature (2)..(2): 2'-deoxy-2'-fluoro
  misc_feature (3)..(3): 2'-O-methyl
  misc_feature (4)..(4): 2'-deoxy-2'-fluoro
  misc_feature (5)..(7): 2'-O-methyl
  misc_feature (8)..(9): 2'-deoxy-2'-fluoro
  misc_feature (10)..(11): 2'-O-methyl
  misc_feature (12)..(12): 2'-deoxy-2'-fluoro
  misc_feature (13)..(13): 2'-O-methyl
  misc_feature (14)..(16): 2'-deoxy-2'-fluoro
  misc_feature (17)..(17): 2'-O-methyl
  misc_feature (18)..(19): 2'-deoxy-2'-fluoro
  misc_feature (1)..(19): ribonucleotide unmodified or modified as described for this sequence
  misc_feature (21)..(21): 3'-3 attached terminal deoxyabasic moiety
gcaugaguuggcacccacutt

SEQ ID NO: 2212 - DNA, 21 bp, Artificial Sequence
  Synthetic
  misc_feature (1)..(1): 2'-O-methyl
  misc_feature (2)..(2): 2'-deoxy-2'-fluoro
  misc_feature (3)..(3): 2'-O-methyl
  misc_feature (4)..(5): 2'-deoxy-2'-fluoro
  misc_feature (6)..(7): 2'-O-methyl
  misc_feature (8)..(8): 2'-deoxy-2'-fluoro
  misc_feature (9)..(9): 2'-O-methyl
  misc_feature (10)..(10): 2'-deoxy-2'-fluoro
  misc_feature (11)..(13): 2'-O-methyl
  misc_feature (14)..(15): 2'-deoxy-2'-fluoro
  misc_feature (16)..(17): 2'-O-methyl
  misc_feature (18)..(18): 2'-deoxy-2'-fluoro
  misc_feature (19)..(19): 2'-O-methyl
  misc_feature (1)..(19): ribonucleotide unmodified or modified as described for this sequence
  misc_feature (21)..(21): 3'-3 attached terminal deoxyabasic moiety
gcguuagcaugaguuggcatt

SEQ ID NO: 2213 - DNA, 21 bp, Artificial Sequence
  Synthetic
  misc_feature (1)..(1): 2'-deoxy-2'-fluoro
  misc_feature (2)..(2): 2'-O-methyl
  misc_feature (3)..(3): 2'-deoxy-2'-fluoro
  misc_feature (4)..(4): 2'-O-methyl
  misc_feature (5)..(6): 2'-deoxy-2'-fluoro
  misc_feature (7)..(8): 2'-O-methyl
  misc_feature (9)..(9): 2'-deoxy-2'-fluoro
  misc_feature (10)..(10): 2'-O-methyl
  misc_feature (11)..(11): 2'-deoxy-2'-fluoro
  misc_feature (12)..(14): 2'-O-methyl
  misc_feature (15)..(16): 2'-deoxy-2'-fluoro
  misc_feature (17)..(18): 2'-O-methyl
  misc_feature (19)..(19): 2'-deoxy-2'-fluoro
  misc_feature (1)..(19): ribonucleotide unmodified or modified as described for this sequence
  misc_feature (21)..(21): 3'-3 attached terminal deoxyabasic moiety
ugcguuagcaugaguuggctt

SEQ ID NO: 2214 - DNA, 21 bp, Artificial Sequence
  Synthetic
  misc_feature (1)..(1): 2'-O-methyl
  misc_feature (2)..(3): 2'-deoxy-2'-fluoro
  misc_feature (4)..(4): 2'-O-methyl
  misc_feature (5)..(5): 2'-deoxy-2'-fluoro
  misc_feature (6)..(6): 2'-O-methyl
  misc_feature (7)..(8): 2'-deoxy-2'-fluoro
  misc_feature (9)..(10): 2'-O-methyl
  misc_feature (11)..(11): 2'-deoxy-2'-fluoro
  misc_feature (12)..(12): 2'-O-methyl
  misc_feature (13)..(13): 2'-deoxy-2'-fluoro
  misc_feature (14)..(16): 2'-O-methyl
  misc_feature (17)..(18): 2'-deoxy-2'-fluoro
  misc_feature (19)..(19): 2'-O-methyl
  misc_feature (1)..(19): ribonucleotide unmodified or modified as described for this sequence
  misc_feature (21)..(21): 3'-3 attached terminal deoxyabasic moiety
gcugcguuagcaugaguugtt

SEQ ID NO: 2215 - DNA, 21 bp, Artificial Sequence
  Synthetic
  misc_feature (1)..(1): 2'-deoxy-2'-fluoro
  misc_feature (2)..(2): 2'-O-methyl
  misc_feature (3)..(4): 2'-deoxy-2'-fluoro
  misc_feature (5)..(5): 2'-O-methyl
  misc_feature (6)..(6): 2'-deoxy-2'-fluoro
  misc_feature (7)..(7): 2'-O-methyl
  misc_feature (8)..(9): 2'-deoxy-2'-fluoro
  misc_feature (10)..(11): 2'-O-methyl
  misc_feature (12)..(12): 2'-deoxy-2'-fluoro
  misc_feature (13)..(13): 2'-O-methyl
  misc_feature (14)..(14): 2'-deoxy-2'-fluoro
  misc_feature (15)..(17): 2'-O-methyl
  misc_feature (18)..(19): 2'-deoxy-2'-fluoro
  misc_feature (1)..(19): ribonucleotide unmodified or modified as described for this sequence
  misc_feature (21)..(21): 3'-3 attached terminal deoxyabasic moiety
ugcugcguuagcaugaguutt

SEQ ID NO: 2216 - DNA, 21 bp, Artificial Sequence
  Synthetic
  misc_feature (1)..(2): 2'-deoxy-2'-fluoro
  misc_feature (3)..(3): 2'-O-methyl
  misc_feature (4)..(5): 2'-deoxy-2'-fluoro
  misc_feature (6)..(6): 2'-O-methyl
  misc_feature (7)..(7): 2'-deoxy-2'-fluoro
  misc_feature (8)..(8): 2'-O-methyl
  misc_feature (9)..(10): 2'-deoxy-2'-fluoro
  misc_feature (11)..(12): 2'-O-methyl
  misc_feature (13)..(13): 2'-deoxy-2'-fluoro
  misc_feature (14)..(14): 2'-O-methyl
  misc_feature (15)..(15): 2'-deoxy-2'-fluoro
  misc_feature (16)..(18): 2'-O-methyl
  misc_feature (19)..(19): 2'-deoxy-2'-fluoro
  misc_feature (1)..(19): ribonucleotide unmodified or modified as described for this sequence
  misc_feature (21)..(21): 3'-3 attached terminal deoxyabasic moiety
cugcugcguuagcaugagutt

SEQ ID NO: 2217 - DNA, 21 bp, Artificial Sequence
  Synthetic
  misc_feature (1)..(1): 2'-O-methyl
  misc_feature (2)..(2): 2'-deoxy-2'-fluoro
  misc_feature (3)..(3): 2'-O-methyl
  misc_feature (4)..(4): 2'-deoxy-2'-fluoro
  misc_feature (5)..(6): 2'-O-methyl
  misc_feature (7)..(11): 2'-deoxy-2'-fluoro
  misc_feature (12)..(13): 2'-O-methyl
  misc_feature (14)..(15): 2'-deoxy-2'-fluoro
  misc_feature (16)..(17): 2'-O-methyl
  misc_feature (18)..(18): 2'-deoxy-2'-fluoro
  misc_feature (19)..(19): 2'-O-methyl
  misc_feature (1)..(19): ribonucleotide unmodified or modified as described for this sequence
  misc_feature (21)..(21): 3'-3 attached terminal deoxyabasic moiety
augcaguucuuggucaaugtt

SEQ ID NO: 2218 - DNA, 21 bp, Artificial Sequence
  Synthetic
  misc_feature (1)..(1): 2'-deoxy-2'-fluoro
  misc_feature (2)..(2): 2'-O-methyl
  misc_feature (3)..(3): 2'-deoxy-2'-fluoro
  misc_feature (4)..(4): 2'-O-methyl
  misc_feature (5)..(5): 2'-deoxy-2'-fluoro
  misc_feature (6)..(7): 2'-O-methyl
  misc_feature (8)..(12): 2'-deoxy-2'-fluoro
  misc_feature (13)..(14): 2'-O-methyl
  misc_feature (15)..(16): 2'-deoxy-2'-fluoro
  misc_feature (17)..(18): 2'-O-methyl
  misc_feature (19)..(19): 2'-deoxy-2'-fluoro
  misc_feature (1)..(19): ribonucleotide unmodified or modified as described for this sequence
  misc_feature (21)..(21): 3'-3 attached terminal deoxyabasic moiety
caugcaguucuuggucaautt

SEQ ID NO: 2219 - DNA, 21 bp, Artificial Sequence
  Synthetic
  misc_feature (1)..(2): 2'-deoxy-2'-fluoro
  misc_feature (3)..(3): 2'-O-methyl
  misc_feature (4)..(4): 2'-deoxy-2'-fluoro
  misc_feature (5)..(5): 2'-O-methyl
  misc_feature (6)..(6): 2'-deoxy-2'-fluoro
  misc_feature (7)..(8): 2'-O-methyl
  misc_feature (9)..(13): 2'-deoxy-2'-fluoro
  misc_feature (14)..(15): 2'-O-methyl
  misc_feature (16)..(17): 2'-deoxy-2'-fluoro
  misc_feature (18)..(19): 2'-O-methyl
  misc_feature (1)..(19): ribonucleotide unmodified or modified as described for this sequence
  misc_feature (21)..(21): 3'-3 attached terminal deoxyabasic moiety
ccaugcaguucuuggucaatt

SEQ ID NO: 2220 - DNA, 21 bp, Artificial Sequence
  Synthetic
  misc_feature (1)..(3): 2'-deoxy-2'-fluoro
  misc_feature (4)..(4): 2'-O-methyl
  misc_feature (5)..(5): 2'-deoxy-2'-fluoro
  misc_feature (6)..(6): 2'-O-methyl
  misc_feature (7)..(7): 2'-deoxy-2'-fluoro
  misc_feature (8)..(9): 2'-O-methyl
  misc_feature (10)..(14): 2'-deoxy-2'-fluoro
  misc_feature (15)..(16): 2'-O-methyl
  misc_feature (17)..(18): 2'-deoxy-2'-fluoro
  misc_feature (19)..(19): 2'-O-methyl
  misc_feature (1)..(19): ribonucleotide unmodified or modified as described for this sequence
  misc_feature (21)..(21): 3'-3 attached terminal deoxyabasic moiety
uccaugcaguucuuggucatt

SEQ ID NO: 2221 - DNA, 21 bp, Artificial Sequence
  Synthetic
  misc_feature (1)..(2): 2'-O-methyl
  misc_feature (3)..(5): 2'-deoxy-2'-fluoro
  misc_feature (6)..(6): 2'-O-methyl
  misc_feature (7)..(7): 2'-deoxy-2'-fluoro
  misc_feature (8)..(8): 2'-O-methyl
  misc_feature (9)..(9): 2'-deoxy-2'-fluoro
  misc_feature (10)..(11): 2'-O-methyl
  misc_feature (12)..(16): 2'-deoxy-2'-fluoro
  misc_feature (17)..(18): 2'-O-methyl
  misc_feature (19)..(19): 2'-deoxy-2'-fluoro
  misc_feature (1)..(19): ribonucleotide unmodified or modified as described for this sequence
  misc_feature (21)..(21): 3'-3 attached terminal deoxyabasic moiety
gguccaugcaguucuuggutt

SEQ ID NO: 2222 - DNA, 21 bp, Artificial Sequence
  Synthetic
  misc_feature (1)..(1): 2'-deoxy-2'-fluoro
  misc_feature (2)..(4): 2'-O-methyl
  misc_feature (5)..(7): 2'-deoxy-2'-fluoro
  misc_feature (8)..(8): 2'-O-methyl
  misc_feature (9)..(9): 2'-deoxy-2'-fluoro
  misc_feature (10)..(10): 2'-O-methyl
  misc_feature (11)..(11): 2'-deoxy-2'-fluoro
  misc_feature (12)..(13): 2'-O-methyl
  misc_feature (14)..(18): 2'-deoxy-2'-fluoro
  misc_feature (19)..(19): 2'-O-methyl
  misc_feature (1)..(19): ribonucleotide unmodified or modified as described for this sequence
  misc_feature (21)..(21): 3'-3 attached terminal deoxyabasic moiety
uagguccaugcaguucuugtt

SEQ ID NO: 2223 - DNA, 21 bp, Artificial Sequence
  Synthetic
  misc_feature (1)..(1): 2'-O-methyl
  misc_feature (2)..(3): 2'-deoxy-2'-fluoro
  misc_feature (4)..(6): 2'-O-methyl
  misc_feature (7)..(9): 2'-deoxy-2'-fluoro
  misc_feature (10)..(10): 2'-O-methyl
  misc_feature (11)..(11): 2'-deoxy-2'-fluoro
  misc_feature (12)..(12): 2'-O-methyl
  misc_feature (13)..(13): 2'-deoxy-2'-fluoro
  misc_feature (14)..(15): 2'-O-methyl
  misc_feature (16)..(19): 2'-deoxy-2'-fluoro
  misc_feature (1)..(19): ribonucleotide unmodified or modified as described for this sequence
  misc_feature (21)..(21): 3'-3 attached terminal deoxyabasic moiety
guuagguccaugcaguucutt

SEQ ID NO: 2224 - DNA, 21 bp, Artificial Sequence
  Synthetic
  misc_feature (1)..(1): 2'-O-methyl
  misc_feature (2)..(2): 2'-deoxy-2'-fluoro
  misc_feature (3)..(3): 2'-O-methyl
  misc_feature (4)..(5): 2'-deoxy-2'-fluoro
  misc_feature (6)..(8): 2'-O-methyl
  misc_feature (9)..(11): 2'-deoxy-2'-fluoro
  misc_feature (12)..(12): 2'-O-methyl
  misc_feature (13)..(13): 2'-deoxy-2'-fluoro
  misc_feature (14)..(14): 2'-O-methyl
  misc_feature (15)..(15): 2'-deoxy-2'-fluoro
  misc_feature (16)..(17): 2'-O-methyl
  misc_feature (18)..(19): 2'-deoxy-2'-fluoro
  misc_feature (1)..(19): ribonucleotide unmodified or modified as described for this sequence
  misc_feature (21)..(21): 3'-3 attached terminal deoxyabasic moiety
auguuagguccaugcaguutt

SEQ ID NO: 2225 - DNA, 21 bp, Artificial Sequence
  Synthetic
  misc_feature (1)..(2): 2'-O-methyl
  misc_feature (3)..(3): 2'-deoxy-2'-fluoro
  misc_feature (4)..(4): 2'-O-methyl
  misc_feature (5)..(6): 2'-deoxy-2'-fluoro
  misc_feature (7)..(9): 2'-O-methyl
  misc_feature (10)..(12): 2'-deoxy-2'-fluoro
  misc_feature (13)..(13): 2'-O-methyl
  misc_feature (14)..(14): 2'-deoxy-2'-fluoro
  misc_feature (15)..(15): 2'-O-methyl
  misc_feature (16)..(16): 2'-deoxy-2'-fluoro
  misc_feature (17)..(18): 2'-O-methyl
  misc_feature (19)..(19): 2'-deoxy-2'-fluoro
  misc_feature (1)..(19): ribonucleotide unmodified or modified as described for this sequence
  misc_feature (21)..(21): 3'-3 attached terminal deoxyabasic moiety
aauguuagguccaugcagutt

SEQ ID NO: 2226 - DNA, 21 bp, Artificial Sequence
  Synthetic
  misc_feature (1)..(3): 2'-O-methyl
  misc_feature (4)..(4): 2'-deoxy-2'-fluoro
  misc_feature (5)..(5): 2'-O-methyl
  misc_feature (6)..(7): 2'-deoxy-2'-fluoro
  misc_feature (8)..(10): 2'-O-methyl
  misc_feature (11)..(13): 2'-deoxy-2'-fluoro
  misc_feature (14)..(14): 2'-O-methyl
  misc_feature (15)..(15): 2'-deoxy-2'-fluoro
  misc_feature (16)..(16): 2'-O-methyl
  misc_feature (17)..(17): 2'-deoxy-2'-fluoro
  misc_feature (18)..(19): 2'-O-methyl
  misc_feature (1)..(19): ribonucleotide unmodified or modified as described for this sequence
  misc_feature (21)..(21): 3'-3 attached terminal deoxyabasic moiety
gaauguuagguccaugcagtt

SEQ ID NO: 2227 - DNA, 21 bp, Artificial Sequence
  Synthetic
  misc_feature (1)..(2): 2'-deoxy-2'-fluoro
  misc_feature (3)..(5): 2'-O-methyl
  misc_feature (6)..(6): 2'-deoxy-2'-fluoro
  misc_feature (7)..(7): 2'-O-methyl
  misc_feature (8)..(9): 2'-deoxy-2'-fluoro
  misc_feature (10)..(12): 2'-O-methyl
  misc_feature (13)..(15): 2'-deoxy-2'-fluoro
  misc_feature (16)..(16): 2'-O-methyl
  misc_feature (17)..(17): 2'-deoxy-2'-fluoro
  misc_feature (18)..(18): 2'-O-methyl
  misc_feature (19)..(19): 2'-deoxy-2'-fluoro
  misc_feature (1)..(19): ribonucleotide unmodified or modified as described for this sequence
  misc_feature (21)..(21): 3'-3 attached terminal deoxyabasic moiety
ucgaauguuagguccaugctt

SEQ ID NO: 2228 - DNA, 21 bp, Artificial Sequence
  Synthetic
  misc_feature (1)..(2): 2'-O-methyl
  misc_feature (3)..(4): 2'-deoxy-2'-fluoro
  misc_feature (5)..(7): 2'-O-methyl
  misc_feature (8)..(8): 2'-deoxy-2'-fluoro
  misc_feature (9)..(9): 2'-O-methyl
  misc_feature (10)..(11): 2'-deoxy-2'-fluoro
  misc_feature (12)..(14): 2'-O-methyl
  misc_feature (15)..(17): 2'-deoxy-2'-fluoro
  misc_feature (18)..(18): 2'-O-methyl
  misc_feature (19)..(19): 2'-deoxy-2'-fluoro
  misc_feature (1)..(19): ribonucleotide unmodified or modified as described for this sequence
  misc_feature (21)..(21): 3'-3 attached terminal deoxyabasic moiety
gaucgaauguuagguccautt

SEQ ID NO: 2229 - DNA, 21 bp, Artificial Sequence
  Synthetic
  misc_feature (1)..(19): ribonucleotide unmodified or modified as described for this sequence
  misc_feature (21)..(21): 3'-3 attached terminal deoxyabasic moiety
cuuugaaaagucgcggucatt

SEQ ID NO: 2230 - DNA, 21 bp, Artificial Sequence
  Synthetic
  misc_feature (1)..(19): ribonucleotide unmodified or modified as described for this sequence
  misc_feature (21)..(21): 3'-3 attached terminal deoxyabasic moiety
gguugaaguugcugagguutt

SEQ ID NO: 2231 - DNA, 21 bp, Artificial Sequence
  Synthetic
  misc_feature (1)..(19): ribonucleotide unmodified or modified as described for this sequence
  misc_feature (21)..(21): 3'-3 attached terminal deoxyabasic moiety
ggguugaaguugcugaggutt

SEQ ID NO: 2232 - DNA, 21 bp, Artificial Sequence
  Synthetic
  misc_feature (1)..(19): ribonucleotide unmodified or modified as described for this sequence
  misc_feature (21)..(21): 3'-3 attached terminal deoxyabasic moiety
ucaagguuuucacuuuuuctt

SEQ ID NO: 2233 - DNA, 21 bp, Artificial Sequence
  Synthetic
  misc_feature (1)..(19): ribonucleotide unmodified or modified as described for this sequence
  misc_feature (21)..(21): 3'-3 attached terminal deoxyabasic moiety
uucaagguuuucacuuuuutt

SEQ ID NO: 2234 - DNA, 21 bp, Artificial Sequence
  Synthetic
  misc_feature (1)..(19): ribonucleotide unmodified or modified as described for this sequence
  misc_feature (21)..(21): 3'-3 attached terminal deoxyabasic moiety
cugugccaccuguucccugtt

SEQ ID NO: 2235 - DNA, 21 bp, Artificial Sequence
  Synthetic
  misc_feature (1)..(19): ribonucleotide unmodified or modified as described for this sequence
  misc_feature (21)..(21): 3'-3 attached terminal deoxyabasic moiety
acgugguucaugacuuucutt

SEQ ID NO: 2236 - DNA, 21 bp, Artificial Sequence
  Synthetic
  misc_feature (1)..(19): ribonucleotide unmodified or modified as described for this sequence
  misc_feature (21)..(21): 3'-3 attached terminal deoxyabasic moiety
aacgugguucaugacuuuctt

SEQ ID NO: 2237 - DNA, 21 bp, Artificial Sequence
  Synthetic
  misc_feature (1)..(19): ribonucleotide unmodified or modified as described for this sequence
  misc_feature (21)..(21): 3'-3 attached terminal deoxyabasic moiety
uuaacgugguucaugacuutt

SEQ ID NO: 2238 - DNA, 21 bp, Artificial Sequence
  Synthetic
  misc_feature (1)..(19): ribonucleotide unmodified or modified as described for this sequence
  misc_feature (21)..(21): 3'-3 attached terminal deoxyabasic moiety
cuguuaacgugguucaugatt

SEQ ID NO: 2239 - DNA, 21 bp, Artificial Sequence
  Synthetic
  misc_feature (1)..(19): ribonucleotide unmodified or modified as described for this sequence
  misc_feature (21)..(21): 3'-3 attached terminal deoxyabasic moiety
gcaugaguuggcacccacutt

SEQ ID NO: 2240 - DNA, 21 bp, Artificial Sequence
  Synthetic
  misc_feature (1)..(19): ribonucleotide unmodified or modified as described for this sequence
  misc_feature (21)..(21): 3'-3 attached terminal deoxyabasic moiety
gcguuagcaugaguuggcatt

SEQ ID NO: 2241 - DNA, 21 bp, Artificial Sequence
  Synthetic
  misc_feature (1)..(19): ribonucleotide unmodified or modified as described for this sequence
  misc_feature (21)..(21): 3'-3 attached terminal deoxyabasic moiety
ugcguuagcaugaguuggctt

SEQ ID NO: 2242 - DNA, 21 bp, Artificial Sequence
  Synthetic
  misc_feature (1)..(19): ribonucleotide unmodified or modified as described for this sequence
  misc_feature (21)..(21): 3'-3 attached terminal deoxyabasic moiety
gcugcguuagcaugaguugtt

SEQ ID NO: 2243 - DNA, 21 bp, Artificial Sequence
  Synthetic
  misc_feature (1)..(19): ribonucleotide unmodified or modified as described for this sequence
  misc_feature (21)..(21): 3'-3 attached terminal deoxyabasic moiety
ugcugcguuagcaugaguutt

SEQ ID NO: 2244 - DNA, 21 bp, Artificial Sequence
  Synthetic
  misc_feature (1)..(19): ribonucleotide unmodified or modified as described for this sequence
  misc_feature (21)..(21): 3'-3 attached terminal deoxyabasic moiety
cugcugcguuagcaugagutt

SEQ ID NO: 2245 - DNA, 21 bp, Artificial Sequence
  Synthetic
  misc_feature (1)..(19): ribonucleotide unmodified or modified as described for this sequence
  misc_feature (21)..(21): 3'-3 attached terminal deoxyabasic moiety
augcaguucuuggucaaugtt

SEQ ID NO: 2246 - DNA, 21 bp, Artificial Sequence
  Synthetic
  misc_feature (1)..(19): ribonucleotide unmodified or modified as described for this sequence
  misc_feature (21)..(21): 3'-3 attached terminal deoxyabasic moiety
caugcaguucuuggucaautt

SEQ ID NO: 2247 - DNA, 21 bp, Artificial Sequence
  Synthetic
  misc_feature (1)..(19): ribonucleotide unmodified or modified as described for this sequence
  misc_feature (21)..(21): 3'-3 attached terminal deoxyabasic moiety
ccaugcaguucuuggucaatt

SEQ ID NO: 2248 - DNA, 21 bp, Artificial Sequence
  Synthetic
  misc_feature (1)..(19): ribonucleotide unmodified or modified as described for this sequence
  misc_feature (21)..(21): 3'-3 attached terminal deoxyabasic moiety
uccaugcaguucuuggucatt

SEQ ID NO: 2249 - DNA, 21 bp, Artificial Sequence
  Synthetic
  misc_feature (1)..(19): ribonucleotide unmodified or modified as described for this sequence
  misc_feature (21)..(21): 3'-3 attached terminal deoxyabasic moiety
gguccaugcaguucuuggutt

SEQ ID NO: 2250 - DNA, 21 bp, Artificial Sequence
  Synthetic
  misc_feature (1)..(19): ribonucleotide unmodified or modified as described for this sequence
  misc_feature (21)..(21): 3'-3 attached terminal deoxyabasic moiety
uagguccaugcaguucuugtt

SEQ ID NO: 2251 - DNA, 21 bp, Artificial Sequence
  Synthetic
  misc_feature (1)..(19): ribonucleotide unmodified or modified as described for this sequence
  misc_feature (21)..(21): 3'-3 attached terminal deoxyabasic moiety
guuagguccaugcaguucutt

SEQ ID NO: 2252 - DNA, 21 bp, Artificial Sequence
  Synthetic
  misc_feature (1)..(19): ribonucleotide unmodified or modified as described for this sequence
  misc_feature (21)..(21): 3'-3 attached terminal deoxyabasic moiety
auguuagguccaugcaguutt

SEQ ID NO: 2253 - DNA, 21 bp, Artificial Sequence
  Synthetic
  misc_feature (1)..(19): ribonucleotide unmodified or modified as described for this sequence
  misc_feature (21)..(21): 3'-3 attached terminal deoxyabasic moiety
aauguuagguccaugcagutt

SEQ ID NO: 2254 - DNA, 21 bp, Artificial Sequence
  Synthetic
  misc_feature (1)..(19): ribonucleotide unmodified or modified as described for this sequence
  misc_feature (21)..(21): 3'-3 attached terminal deoxyabasic moiety
gaauguuagguccaugcagtt

SEQ ID NO: 2255 - DNA, 21 bp, Artificial Sequence
  Synthetic
  misc_feature (1)..(19): ribonucleotide unmodified or modified as described for this sequence
  misc_feature (21)..(21): 3'-3 attached terminal deoxyabasic moiety
ucgaauguuagguccaugctt

SEQ ID NO: 2256 - DNA, 21 bp, Artificial Sequence
  Synthetic
  misc_feature (1)..(19): ribonucleotide unmodified or modified as described for this sequence
  misc_feature (21)..(21): 3'-3 attached terminal deoxyabasic moiety
gaucgaauguuagguccautt

SEQ ID NO: 2257 - DNA, 21 bp, Artificial Sequence
  Synthetic
  misc_feature (1)..(1): 2'-O-methyl
  misc_feature (2)..(3): 2'-deoxy-2'-fluoro
  misc_feature (4)..(4): 2'-O-methyl
  misc_feature (5)..(5): 2'-deoxy-2'-fluoro
  misc_feature (6)..(6): 2'-O-methyl
  misc_feature (7)..(7): 2'-deoxy-2'-fluoro
  misc_feature (8)..(10): 2'-O-methyl
  misc_feature (11)..(13): 2'-deoxy-2'-fluoro
  misc_feature (14)..(15): 2'-O-methyl
  misc_feature (16)..(16): 2'-deoxy-2'-fluoro
  misc_feature (17)..(17): 2'-O-methyl
  misc_feature (18)..(19): 2'-deoxy-2'-fluoro
  misc_feature (20)..(21): internucleotide phosphorothioate linkage
  misc_feature (1)..(19): ribonucleotide unmodified or modified as described for this sequence
acugcauggaccuaacauutt

SEQ ID NO: 2258 - DNA, 21 bp, Artificial Sequence
  Synthetic
  misc_feature (1)..(1): 2'-O-methyl
  misc_feature (2)..(2): 2'-deoxy-2'-fluoro
  misc_feature (3)..(3): 2'-O-methyl
  misc_feature (4)..(4): 2'-deoxy-2'-fluoro
  misc_feature (5)..(7): 2'-O-methyl
  misc_feature (8)..(10): 2'-deoxy-2'-fluoro
  misc_feature (11)..(12): 2'-O-methyl
  misc_feature (13)..(13): 2'-deoxy-2'-fluoro
  misc_feature (14)..(14): 2'-O-methyl
  misc_feature (15)..(17): 2'-deoxy-2'-fluoro
  misc_feature (18)..(19): 2'-O-methyl
  misc_feature (20)..(21): internucleotide phosphorothioate linkage
  misc_feature (1)..(19): ribonucleotide unmodified or modified as described for this sequence
gcauggaccuaacauucgatt

SEQ ID NO: 2259 - DNA, 21 bp, Artificial Sequence
  Synthetic
  misc_feature (1)..(1): 5'-3 attached terminal deoxyabasic moiety
  misc_feature (1)..(1): 2'-O-methyl
  misc_feature (4)..(4): 2'-O-methyl
  misc_feature (6)..(6): 2'-O-methyl
  misc_feature (8)..(10): 2'-O-methyl
  misc_feature (14)..(15): 2'-O-methyl
  misc_feature (17)..(17): 2'-O-methyl
  misc_feature (1)..(19): ribonucleotide unmodified or modified as described for this sequence
  misc_feature (21)..(21): 3'-3 attached terminal deoxyabasic moiety
acugcauggaccuaacauutt

SEQ ID NO: 2260 - DNA, 21 bp, Artificial Sequence
  Synthetic
  misc_feature (1)..(1): 5'-3 attached terminal deoxyabasic moiety
  misc_feature (1)..(1): 2'-O-methyl
  misc_feature (3)..(3): 2'-O-methyl
  misc_feature (7)..(7): 2'-O-methyl
  misc_feature (11)..(12): 2'-O-methyl
  misc_feature (14)..(14): 2'-O-methyl
  misc_feature (18)..(19): 2'-O-methyl
  misc_feature (1)..(19): ribonucleotide unmodified or modified as described for this sequence
  misc_feature (21)..(21): 3'-3 attached terminal deoxyabasic moiety
gcauggaccuaacauucgatt

SEQ ID NO: 2261 - DNA, 21 bp, Artificial Sequence
  Synthetic
  misc_feature (1)..(1): 5'-3 attached terminal deoxyabasic moiety
  misc_feature (1)..(3): deoxy
  misc_feature (4)..(7): 2'-deoxy-2'-fluoro
  misc_feature (8)..(12): deoxy
  misc_feature (13)..(13): 2'-deoxy-2'-fluoro
  misc_feature (14)..(19): deoxy
  misc_feature (1)..(19): ribonucleotide unmodified or modified as described for this sequence
  misc_feature (21)..(21): 3'-3 attached terminal deoxyabasic moiety
aaguuccaaaagugaaaaatt

SEQ ID NO: 2262 - DNA, 21 bp, Artificial Sequence
  Synthetic
  misc_feature (1)..(1): 5'-3 attached terminal deoxyabasic moiety
  misc_feature (1)..(2): deoxy
  misc_feature (3)..(3): 2'-deoxy-2'-fluoro
  misc_feature (4)..(5): deoxy
  misc_feature (6)..(6): 2'-deoxy-2'-fluoro
  misc_feature (7)..(7): deoxy
  misc_feature (8)..(8): 2'-deoxy-2'-fluoro
  misc_feature (9)..(10): deoxy
  misc_feature (11)..(12): 2'-deoxy-2'-fluoro
  misc_feature (13)..(13): deoxy
  misc_feature (14)..(14): 2'-deoxy-2'-fluoro
  misc_feature (15)..(15): deoxy
  misc_feature (16)..(18): 2'-deoxy-2'-fluoro
  misc_feature (19)..(19): deoxy
  misc_feature (1)..(19): ribonucleotide unmodified or modified as described for this sequence
  misc_feature (21)..(21): 3'-3 attached terminal deoxyabasic moiety
gacgacgcaaucguacucatt

SEQ ID NO: 2263 - DNA, 21 bp, Artificial Sequence
  Synthetic
  misc_feature (1)..(1): 5'-3 attached terminal deoxyabasic moiety
  misc_feature (1)..(2): deoxy
  misc_feature (3)..(3): 2'-deoxy-2'-fluoro
  misc_feature (4)..(4): deoxy
  misc_feature (5)..(5): 2'-deoxy-2'-fluoro
  misc_feature (6)..(6): deoxy
  misc_feature (7)..(8): 2'-deoxy-2'-fluoro
  misc_feature (9)..(13): deoxy
  misc_feature (14)..(15): 2'-deoxy-2'-fluoro
  misc_feature (16)..(17): deoxy
  misc_feature (18)..(19): 2'-deoxy-2'-fluoro
  misc_feature (1)..(19): ribonucleotide unmodified or modified as described for this sequence
  misc_feature (21)..(21): 3'-3 attached terminal deoxyabasic moiety
gguacgucaagaaccaguutt

SEQ ID NO: 2264 - DNA, 21 bp, Artificial Sequence
  Synthetic
  misc_feature (1)..(1): 5'-3 attached terminal deoxyabasic moiety
  misc_feature (1)..(1): deoxy
  misc_feature (2)..(4): 2'-deoxy-2'-fluoro
  misc_feature (5)..(7): deoxy
  misc_feature (8)..(8): 2'-deoxy-2'-fluoro
  misc_feature (9)..(9): deoxy
  misc_feature (10)..(10): 2'-deoxy-2'-fluoro
  misc_feature (11)..(11): deoxy
  misc_feature (12)..(13): 2'-deoxy-2'-fluoro
  misc_feature (14)..(18): deoxy
  misc_feature (19)..(19): 2'-deoxy-2'-fluoro
  misc_feature (1)..(19): ribonucleotide unmodified or modified as described for this sequence
  misc_feature (21)..(21): 3'-3 attached terminal deoxyabasic moiety
auccagguacgucaagaactt

SEQ ID NO: 2265 - DNA, 21 bp, Artificial Sequence
  Synthetic
  misc_feature (1)..(1): 5'-3 attached terminal deoxyabasic moiety
  misc_feature (1)..(2): 2'-deoxy-2'-fluoro
  misc_feature (3)..(3): deoxy
  misc_feature (4)..(4): 2'-deoxy-2'-fluoro
  misc_feature (5)..(6): deoxy
  misc_feature (7)..(9): 2'-deoxy-2'-fluoro
  misc_feature (10)..(12): deoxy
  misc_feature (13)..(13): 2'-deoxy-2'-fluoro
  misc_feature (14)..(14): deoxy
  misc_feature (15)..(15): 2'-deoxy-2'-fluoro
  misc_feature (16)..(16): deoxy
  misc_feature (17)..(18): 2'-deoxy-2'-fluoro
  misc_feature (19)..(19): deoxy
  misc_feature (1)..(19): ribonucleotide unmodified or modified as described for this sequence
  misc_feature (21)..(21): 3'-3 attached terminal deoxyabasic moiety
uuacaauccagguacgucatt

SEQ ID NO: 2266 - DNA, 21 bp, Artificial Sequence
  Synthetic
  misc_feature (1)..(1): 5'-3 attached terminal deoxyabasic moiety
  misc_feature (1)..(3): 2'-deoxy-2'-fluoro
  misc_feature (4)..(4): deoxy
  misc_feature (5)..(5): 2'-deoxy-2'-fluoro
  misc_feature (6)..(7): deoxy
  misc_feature (8)..(10): 2'-deoxy-2'-fluoro
  misc_feature (11)..(13): deoxy
  misc_feature (14)..(14): 2'-deoxy-2'-fluoro
  misc_feature (15)..(15): deoxy
  misc_feature (16)..(16): 2'-deoxy-2'-fluoro
  misc_feature (17)..(17): deoxy
  misc_feature (18)..(19): 2'-deoxy-2'-fluoro
  misc_feature (1)..(19): ribonucleotide unmodified or modified as described for this sequence
  misc_feature (21)..(21): 3'-3 attached terminal deoxyabasic moiety
cuuacaauccagguacguctt

SEQ ID NO: 2267 - DNA, 21 bp, Artificial Sequence
  Synthetic
  misc_feature (1)..(1): 5'-3 attached terminal deoxyabasic moiety
  misc_feature (1)..(2): deoxy
  misc_feature (3)..(5): 2'-deoxy-2'-fluoro
  misc_feature (6)..(6): deoxy
  misc_feature (7)..(7): 2'-deoxy-2'-fluoro
  misc_feature (8)..(9): deoxy
  misc_feature (10)..(12): 2'-deoxy-2'-fluoro
  misc_feature (13)..(15): deoxy
  misc_feature (16)..(16): 2'-deoxy-2'-fluoro
  misc_feature (17)..(17): deoxy
  misc_feature (18)..(18): 2'-deoxy-2'-fluoro
  misc_feature (19)..(19): deoxy
  misc_feature (20)..(20): n is thymidine
  misc_feature (21)..(21): 3'-3 attached terminal deoxyabasic moiety
  misc_feature (1)..(19): ribonucleotide unmodified or modified as described for this sequence
agcuuacaauccagguacgtt

SEQ ID NO: 2268 - DNA, 21 bp, Artificial Sequence
  Synthetic
  misc_feature (1)..(1): 5'-3 attached terminal deoxyabasic moiety
  misc_feature (1)..(2): 2'-deoxy-2'-fluoro
  misc_feature (3)..(4): deoxy
  misc_feature (5)..(7): 2'-deoxy-2'-fluoro
  misc_feature (8)..(8): deoxy
  misc_feature (9)..(9): 2'-deoxy-2'-fluoro
  misc_feature (10)..(11): deoxy
  misc_feature (12)..(14): 2'-deoxy-2'-fluoro
  misc_feature (15)..(17): deoxy
  misc_feature (18)..(18): 2'-deoxy-2'-fluoro
  misc_feature (19)..(19): deoxy
  misc_feature (20)..(20): n is thymidine
  misc_feature (21)..(21): 3'-3 attached terminal deoxyabasic moiety
  misc_feature (1)..(19): ribonucleotide unmodified or modified as described for this sequence
cuagcuuacaauccagguatt

SEQ ID NO: 2269 - DNA, 21 bp, Artificial Sequence
  Synthetic
  misc_feature (1)..(6): 2'-deoxy-2'-fluoro
  misc_feature (7)..(7): 2'-O-methyl
  misc_feature (8)..(12): 2'-deoxy-2'-fluoro
  misc_feature (13)..(16): 2'-O-methyl
  misc_feature (17)..(19): 2'-deoxy-2'-fluoro
  misc_feature (20)..(21): internucleotide phosphorothioate linkage
  misc_feature (1)..(19): ribonucleotide unmodified or modified as described for this sequence
uuuuucacuuuuggaacuutt

SEQ ID NO: 2270 - DNA, 21 bp, Artificial Sequence
  Synthetic
  misc_feature (1)..(1): 2'-deoxy-2'-fluoro
  misc_feature (2)..(4): 2'-O-methyl
  misc_feature (5)..(5): 2'-deoxy-2'-fluoro
  misc_feature (6)..(6): 2'-O-methyl
  misc_feature (7)..(7): 2'-deoxy-2'-fluoro
  misc_feature (8)..(9): 2'-O-methyl
  misc_feature (10)..(11): 2'-deoxy-2'-fluoro
  misc_feature (12)..(12): 2'-O-methyl
  misc_feature (13)..(13): 2'-deoxy-2'-fluoro
  misc_feature (14)..(14): 2'-O-methyl
  misc_feature (15)..(16): 2'-deoxy-2'-fluoro
  misc_feature (17)..(17): 2'-O-methyl
  misc_feature (18)..(19): 2'-deoxy-2'-fluoro
  misc_feature (20)..(21): internucleotide phosphorothioate linkage
  misc_feature (1)..(19): ribonucleotide unmodified or modified as described for this sequence
ugaguacgauugcgucguctt

SEQ ID NO: 2271 - DNA, 21 bp, Artificial Sequence
  Synthetic
  misc_feature (1)..(2): 2'-O-methyl
  misc_feature (3)..(4): 2'-deoxy-2'-fluoro
  misc_feature (5)..(6): 2'-O-methyl
  misc_feature (7)..(11): 2'-deoxy-2'-fluoro
  misc_feature (12)..(13): 2'-O-methyl
  misc_feature (14)..(14): 2'-deoxy-2'-fluoro
  misc_feature (15)..(15): 2'-O-methyl
  misc_feature (16)..(16): 2'-deoxy-2'-fluoro
  misc_feature (17)..(17): 2'-O-methyl
  misc_feature (18)..(19): 2'-deoxy-2'-fluoro
  misc_feature (20)..(21): internucleotide phosphorothioate linkage
  misc_feature (1)..(19): ribonucleotide unmodified or modified as described for this sequence
aacugguucuugacguacctt

SEQ ID NO: 2272 - DNA, 21 bp, Artificial Sequence
  Synthetic
  misc_feature (1)..(1): 2'-O-methyl
  misc_feature (2)..(6): 2'-deoxy-2'-fluoro
  misc_feature (7)..(8): 2'-O-methyl
  misc_feature (9)..(9): 2'-deoxy-2'-fluoro
  misc_feature (10)..(10): 2'-O-methyl
  misc_feature (11)..(11): 2'-deoxy-2'-fluoro
  misc_feature (12)..(12): 2'-O-methyl
  misc_feature (13)..(15): 2'-deoxy-2'-fluoro
  misc_feature (16)..(18): 2'-O-methyl
  misc_feature (19)..(19): 2'-deoxy-2'-fluoro
  misc_feature (20)..(21): internucleotide phosphorothioate linkage
  misc_feature (1)..(19): ribonucleotide unmodified or modified as described for this sequence
guucuugacguaccuggautt

SEQ ID NO: 2273 - DNA, 21 bp, Artificial Sequence
  Synthetic
  misc_feature (1)..(1): 2'-deoxy-2'-fluoro
  misc_feature (2)..(3): 2'-O-methyl
  misc_feature (4)..(4): 2'-deoxy-2'-fluoro
  misc_feature (5)..(5): 2'-O-methyl
  misc_feature (6)..(6): 2'-deoxy-2'-fluoro
  misc_feature (7)..(7): 2'-O-methyl
  misc_feature (8)..(10): 2'-deoxy-2'-fluoro
  misc_feature (11)..(13): 2'-O-methyl
  misc_feature (14)..(15): 2'-deoxy-2'-fluoro
  misc_feature (16)..(16): 2'-O-methyl
  misc_feature (17)..(17): 2'-deoxy-2'-fluoro
  misc_feature (18)..(19): 2'-O-methyl
  misc_feature (20)..(21): internucleotide phosphorothioate linkage
  misc_feature (1)..(19): ribonucleotide unmodified or modified as described for this sequence
ugacguaccuggauuguaatt

SEQ ID NO: 2274 - DNA, 21 bp, Artificial Sequence
  Synthetic
  misc_feature (1)..(2): 2'-O-methyl
  misc_feature (3)..(3): 2'-deoxy-2'-fluoro
  misc_feature (4)..(4): 2'-O-methyl
  misc_feature (5)..(5): 2'-deoxy-2'-fluoro
  misc_feature (6)..(6): 2'-O-methyl
  misc_feature (7)..(9): 2'-deoxy-2'-fluoro
  misc_feature (10)..(12): 2'-O-methyl
  misc_feature (13)..(14): 2'-deoxy-2'-fluoro
  misc_feature (15)..(15): 2'-O-methyl
  misc_feature (16)..(16): 2'-deoxy-2'-fluoro
  misc_feature (17)..(19): 2'-O-methyl
  misc_feature (20)..(21): internucleotide phosphorothioate linkage
  misc_feature (1)..(19): ribonucleotide unmodified or modified as described for this sequence
gacguaccuggauuguaagtt

SEQ ID NO: 2275 - DNA, 21 bp, Artificial Sequence
  Synthetic
  misc_feature (1)..(1): 2'-deoxy-2'-fluoro
  misc_feature (2)..(2): 2'-O-methyl
  misc_feature (3)..(3): 2'-deoxy-2'-fluoro
  misc_feature (4)..(4): 2'-O-methyl
  misc_feature (5)..(7): 2'-deoxy-2'-fluoro
  misc_feature (8)..(10): 2'-O-methyl
  misc_feature (11)..(12): 2'-deoxy-2'-fluoro
  misc_feature (13)..(13): 2'-O-methyl
  misc_feature (14)..(14): 2'-deoxy-2'-fluoro
  misc_feature (15)..(17): 2'-O-methyl
  misc_feature (18)..(19): 2'-deoxy-2'-fluoro
  misc_feature (20)..(21): internucleotide phosphorothioate linkage
  misc_feature (1)..(19): ribonucleotide unmodified or modified as described for this sequence
cguaccuggauuguaagcutt

SEQ ID NO: 2276 - DNA, 21 bp, Artificial Sequence
  Synthetic
  misc_feature (1)..(1): 2'-deoxy-2'-fluoro
  misc_feature (2)..(2): 2'-O-methyl
  misc_feature (3)..(5): 2'-deoxy-2'-fluoro
  misc_feature (6)..(8): 2'-O-methyl
  misc_feature (9)..(10): 2'-deoxy-2'-fluoro
  misc_feature (11)..(11): 2'-O-methyl
  misc_feature (12)..(12): 2'-deoxy-2'-fluoro
  misc_feature (13)..(15): 2'-O-methyl
  misc_feature (16)..(17): 2'-deoxy-2'-fluoro
  misc_feature (18)..(19): 2'-O-methyl
  misc_feature (20)..(21): internucleotide phosphorothioate linkage
  misc_feature (1)..(19): ribonucleotide unmodified or modified as described for this sequence
uaccuggauuguaagcuagtt

SEQ ID NO: 2277 - DNA, 21 bp, Artificial Sequence
  Synthetic
  misc_feature (1)..(19): ribonucleotide unmodified or modified as described for this sequence
uuacaauccagguacgucatt

SEQ ID NO: 2278 - DNA, 21 bp, Artificial Sequence
  Synthetic
  misc_feature (1)..(19): ribonucleotide unmodified or modified as described for this sequence
agcuuacaauccagguacgtt

SEQ ID NO: 2279 - DNA, 21 bp, Artificial Sequence
  Synthetic
  misc_feature (1)..(19): ribonucleotide unmodified or modified as described for this sequence
ugacguaccuggauuguaatt

SEQ ID NO: 2280 - DNA, 21 bp, Artificial Sequence
  Synthetic
  misc_feature (1)..(19): ribonucleotide unmodified or modified as described for this sequence
cguaccuggauuguaagcutt

SEQ ID NO: 2281 - DNA, 21 bp, Artificial Sequence
  Synthetic
  misc_feature (1)..(1): 5'-3 attached terminal deoxyabasic moiety
  misc_feature (1)..(2): 2'-deoxy-2'-fluoro
  misc_feature (4)..(4): 2'-deoxy-2'-fluoro
  misc_feature (7)..(9): 2'-deoxy-2'-fluoro
  misc_feature (13)..(13): 2'-deoxy-2'-fluoro
  misc_feature (15)..(15): 2'-deoxy-2'-fluoro
  misc_feature (17)..(18): 2'-deoxy-2'-fluoro
  misc_feature (20)..(20): n is thymidine
  misc_feature (21)..(21): 3'-3 attached terminal deoxyabasic moiety
  misc_feature (1)..(19): ribonucleotide unmodified or modified as described for this sequence
uuacaauccagguacgucatt

SEQ ID NO: 2282 - DNA, 21 bp, Artificial Sequence
  Synthetic
  misc_feature (1)..(1): 5'-3 attached terminal deoxyabasic moiety
  misc_feature (3)..(5): 2'-deoxy-2'-fluoro
  misc_feature (7)..(7): 2'-deoxy-2'-fluoro
  misc_feature (10)..(12): 2'-deoxy-2'-fluoro
  misc_feature (16)..(16): 2'-deoxy-2'-fluoro
  misc_feature (18)..(18): 2'-deoxy-2'-fluoro
  misc_feature (20)..(20): n is thymidine
  misc_feature (21)..(21): 3'-3 attached terminal deoxyabasic moiety
  misc_feature (1)..(19): ribonucleotide unmodified or modified as described for this sequence
agcuuacaauccagguacgtt

SEQ ID NO: 2283 - DNA, 21 bp, Artificial Sequence
  Synthetic
  misc_feature (1)..(1): 2'-deoxy-2'-fluoro
  misc_feature (4)..(4): 2'-deoxy-2'-fluoro
  misc_feature (6)..(6): 2'-deoxy-2'-fluoro
  misc_feature (8)..(10): 2'-deoxy-2'-fluoro
  misc_feature (14)..(15): 2'-deoxy-2'-fluoro
  misc_feature (17)..(17): 2'-deoxy-2'-fluoro
  misc_feature (20)..(21): internucleotide phosphorothioate linkage
  misc_feature (1)..(19): ribonucleotide unmodified or modified as described for this sequence
ugacguaccuggauuguaatt

SEQ ID NO: 2284 - DNA, 21 bp, Artificial Sequence
  Synthetic
  misc_feature (1)..(1): 2'-deoxy-2'-fluoro
  misc_feature (3)..(3): 2'-deoxy-2'-fluoro
  misc_feature (5)..(7): 2'-deoxy-2'-fluoro
  misc_feature (11)..(12): 2'-deoxy-2'-fluoro
  misc_feature (14)..(14): 2'-deoxy-2'-fluoro
  misc_feature (18)..(19): 2'-deoxy-2'-fluoro
  misc_feature (20)..(21): internucleotide phosphorothioate linkage
  misc_feature (1)..(19): ribonucleotide unmodified or modified as described for this sequence
cguaccuggauuguaagcutt

SEQ ID NO: 2285 - DNA, 21 bp, Artificial Sequence
  Synthetic
  misc_feature (1)..(2): 2'-deoxy-2'-fluoro
  misc_feature (3)..(3): 2'-O-methyl
  misc_feature (4)..(4): 2'-deoxy-2'-fluoro
  misc_feature (5)..(6): 2'-O-methyl
  misc_feature (7)..(9): 2'-deoxy-2'-fluoro
  misc_feature (10)..(12): 2'-O-methyl
  misc_feature (13)..(13): 2'-deoxy-2'-fluoro
  misc_feature (14)..(14): 2'-O-methyl
  misc_feature (15)..(15): 2'-deoxy-2'-fluoro
  misc_feature (16)..(16): 2'-O-methyl
  misc_feature (17)..(18): 2'-deoxy-2'-fluoro
  misc_feature (19)..(19): 2'-O-methyl
  misc_feature (20)..(21): internucleotide phosphorothioate linkage
  misc_feature (1)..(19): ribonucleotide unmodified or modified as described for this sequence
uuacaauccagguacgucatt

SEQ ID NO: 2286 - DNA, 21 bp, Artificial Sequence
  Synthetic
  misc_feature (1)..(2): 2'-O-methyl
  misc_feature (3)..(5): 2'-deoxy-2'-fluoro
  misc_feature (6)..(6): 2'-O-methyl
  misc_feature (7)..(7): 2'-deoxy-2'-fluoro
  misc_feature (8)..(9): 2'-O-methyl
  misc_feature (10)..(12): 2'-deoxy-2'-fluoro
  misc_feature (13)..(15): 2'-O-methyl
  misc_feature (16)..(16): 2'-deoxy-2'-fluoro
  misc_feature (17)..(17): 2'-O-methyl
  misc_feature (18)..(18): 2'-deoxy-2'-fluoro
  misc_feature (19)..(19): 2'-O-methyl
  misc_feature (1)..(19): ribonucleotide unmodified or modified as described for this sequence
  misc_feature (20)..(21): internucleotide phosphorothioate linkage
agcuuacaauccagguacgtt

SEQ ID NO: 2287 - DNA, 21 bp, Artificial Sequence
  Synthetic
  misc_feature (1)..(1): 5'-3 attached terminal deoxyabasic moiety
  misc_feature (1)..(19): ribonucleotide unmodified or modified as described for this sequence
  misc_feature (21)..(21): 3'-3 attached terminal deoxyabasic moiety
uuacaauccagguacgucatt

SEQ ID NO: 2288 - DNA, 21 bp, Artificial Sequence
  Synthetic
  misc_feature (1)..(1): 5'-3 attached terminal deoxyabasic moiety
  misc_feature (1)..(19): ribonucleotide unmodified or modified as described for this sequence
  misc_feature (21)..(21): 3'-3 attached terminal deoxyabasic moiety
agcuuacaauccagguacgtt

SEQ ID NO: 2289 - DNA, 21 bp, Artificial Sequence
  Synthetic
  misc_feature (20)..(21): internucleotide phosphorothioate linkage
  misc_feature (1)..(19): ribonucleotide unmodified or modified as described for this sequence
ugacguaccuggauuguaatt

SEQ ID NO: 2290 - DNA, 21 bp, Artificial Sequence
  Synthetic
  misc_feature (20)..(21): internucleotide phosphorothioate linkage
  misc_feature (1)..(19): ribonucleotide unmodified or modified as described for this sequence
cguaccuggauuguaagcutt

SEQ ID NO: 2291 - DNA, 21 bp, Artificial Sequence
  Synthetic
  misc_feature (1)..(1): 5'-3 attached terminal deoxyabasic moiety
  misc_feature (3)..(3): 2'-O-methyl
  misc_feature (5)..(6): 2'-O-methyl
  misc_feature (10)..(12): 2'-O-methyl
  misc_feature (14)..(14): 2'-O-methyl
  misc_feature (16)..(16): 2'-O-methyl
  misc_feature (19)..(19): 2'-O-methyl
  misc_feature (1)..(19): ribonucleotide unmodified or modified as described for this sequence
  misc_feature (21)..(21): 3'-3 attached terminal deoxyabasic moiety
uuacaauccagguacgucatt

SEQ ID NO: 2292 - DNA, 21 bp, Artificial Sequence
  Synthetic
  misc_feature (1)..(1): 5'-3 attached terminal deoxyabasic moiety
  misc_feature (1)..(2): 2'-O-methyl
  misc_feature (6)..(6): 2'-O-methyl
  misc_feature (8)..(9): 2'-O-methyl
  misc_feature (13)..(15): 2'-O-methyl
  misc_feature (17)..(17): 2'-O-methyl
  misc_feature (19)..(19): 2'-O-methyl
  misc_feature (1)..(19): ribonucleotide unmodified or modified as described for this sequence
  misc_feature (21)..(21): 3'-3 attached terminal deoxyabasic moiety
agcuuacaauccagguacgtt

SEQ ID NO: 2293 - DNA, 21 bp, Artificial Sequence
  Synthetic
  misc_feature (1)..(1): 5'-3 attached terminal deoxyabasic moiety
  misc_feature (1)..(2): 2'-deoxy-2'-fluoro
  misc_feature (3)..(3): 2'-O-methyl
  misc_feature (4)..(4): 2'-deoxy-2'-fluoro
  misc_feature (5)..(6): 2'-O-methyl
  misc_feature (7)..(9): 2'-deoxy-2'-fluoro
  misc_feature (10)..(12): 2'-O-methyl
  misc_feature (13)..(13): 2'-deoxy-2'-fluoro
  misc_feature (14)..(14): 2'-O-methyl
  misc_feature (15)..(15): 2'-deoxy-2'-fluoro
  misc_feature (16)..(16): 2'-O-methyl
  misc_feature (17)..(18): 2'-deoxy-2'-fluoro
  misc_feature (19)..(19): 2'-O-methyl
  misc_feature (1)..(19): ribonucleotide unmodified or modified as described for this sequence
  misc_feature (21)..(21): 3'-3 attached terminal deoxyabasic moiety
uuacaauccagguacgucatt

SEQ ID NO: 2294 - DNA, 21 bp, Artificial Sequence
  Synthetic
  misc_feature (1)..(1): 5'-3 attached terminal deoxyabasic moiety
  misc_feature (1)..(2): 2'-O-methyl
  misc_feature (3)..(5): 2'-deoxy-2'-fluoro
  misc_feature (6)..(6): 2'-O-methyl
  misc_feature (7)..(7): 2'-deoxy-2'-fluoro
  misc_feature (8)..(9): 2'-O-methyl
  misc_feature (10)..(12): 2'-deoxy-2'-fluoro
  misc_feature (13)..(15): 2'-O-methyl
  misc_feature (16)..(16): 2'-deoxy-2'-fluoro
  misc_feature (17)..(17): 2'-O-methyl
  misc_feature (18)..(18): 2'-deoxy-2'-fluoro
  misc_feature (19)..(19): 2'-O-methyl
  misc_feature (1)..(19): ribonucleotide unmodified or modified as described for this sequence
  misc_feature (21)..(21): 3'-3 attached terminal deoxyabasic moiety
agcuuacaauccagguacgtt

SEQ ID NO: 2295 - DNA, 21 bp, Artificial Sequence
  Synthetic
  misc_feature (1)..(1): 5'-3 attached terminal deoxyabasic moiety
  misc_feature (1)..(4): deoxy
  misc_feature (5)..(10): 2'-deoxy-2'-fluoro
  misc_feature (11)..(12): deoxy
  misc_feature (13)..(13): 2'-deoxy-2'-fluoro
  misc_feature (14)..(14): deoxy
  misc_feature (15)..(16): 2'-deoxy-2'-fluoro
  misc_feature (17)..(18): deoxy
  misc_feature (19)..(19): 2'-deoxy-2'-fluoro
  misc_feature (1)..(19): ribonucleotide unmodified or modified as described for this sequence
  misc_feature (21)..(21): 3'-3 attached terminal deoxyabasic moiety
gaaacuuuucagcgccagutt

SEQ ID NO: 2296 - DNA, 21 bp, Artificial Sequence
  Synthetic
  misc_feature (1)..(1): 5'-3 attached terminal deoxyabasic moiety
  misc_feature (1)..(2): 2'-deoxy-2'-fluoro
  misc_feature (3)..(4): deoxy
  misc_feature (5)..(8): 2'-deoxy-2'-fluoro
  misc_feature (9)..(10): deoxy
  misc_feature (11)..(11): 2'-deoxy-2'-fluoro
  misc_feature (12)..(13): deoxy
  misc_feature (14)..(17): 2'-deoxy-2'-fluoro
  misc_feature (18)..(19): deoxy
  misc_feature (1)..(19): ribonucleotide unmodified or modified as described for this sequence
  misc_feature (21)..(21): 3'-3 attached terminal deoxyabasic moiety
ccaacuucaacgacuccaatt

SEQ ID NO: 2297 - DNA, 21 bp, Artificial Sequence
  Synthetic
  misc_feature (1)..(1): 5'-3 attached terminal deoxyabasic moiety
  misc_feature (1)..(3): 2'-deoxy-2'-fluoro
  misc_feature (4)..(5): deoxy
  misc_feature (6)..(9): 2'-deoxy-2'-fluoro
  misc_feature (10)..(11): deoxy
  misc_feature (12)..(12): 2'-deoxy-2'-fluoro
  misc_feature (13)..(14): deoxy
  misc_feature (15)..(18): 2'-deoxy-2'-fluoro
  misc_feature (19)..(19): deoxy
  misc_feature (1)..(19): ribonucleotide unmodified or modified as described for this sequence
  misc_feature (21)..(21): 3'-3 attached terminal deoxyabasic moiety
cccaacuucaacgacuccatt

SEQ ID NO: 2298 - DNA, 21 bp, Artificial Sequence
  Synthetic
  misc_feature (1)..(1): 5'-3 attached terminal deoxyabasic moiety
  misc_feature (1)..(2): deoxy
  misc_feature (3)..(6): 2'-deoxy-2'-fluoro
  misc_feature (7)..(11): deoxy
  misc_feature (12)..(12): 2'-deoxy-2'-fluoro
  misc_feature (13)..(19): deoxy
  misc_feature (1)..(19): ribonucleotide unmodified or modified as described for this sequence
  misc_feature (21)..(21): 3'-3 attached terminal deoxyabasic moiety
aguuccaaaagugaaaaagtt

SEQ ID NO: 2299 - DNA, 21 bp, Artificial Sequence
  Synthetic
  misc_feature (1)..(1): 5'-3 attached terminal deoxyabasic moiety
  misc_feature (1)..(2): deoxy
  misc_feature (3)..(3): 2'-deoxy-2'-fluoro
  misc_feature (4)..(4): deoxy
  misc_feature (5)..(5): 2'-deoxy-2'-fluoro
  misc_feature (6)..(7): deoxy
  misc_feature (8)..(8): 2'-deoxy-2'-fluoro
  misc_feature (9)..(11): deoxy
  misc_feature (12)..(12): 2'-deoxy-2'-fluoro
  misc_feature (13)..(18): deoxy
  misc_feature (19)..(19): 2'-deoxy-2'-fluoro
  misc_feature (1)..(19): ribonucleotide unmodified or modified as described for this sequence
  misc_feature (21)..(21): 3'-3 attached terminal deoxyabasic moiety
gacacgguggacaagggactt

SEQ ID NO: 2300 - DNA, 21 bp, Artificial Sequence
  Synthetic
  misc_feature (1)..(1): 5'-3 attached terminal deoxyabasic moiety
  misc_feature (1)..(1): 2'-deoxy-2'-fluoro
  misc_feature (2)..(2): deoxy
  misc_feature (3)..(3): 2'-deoxy-2'-fluoro
  misc_feature (4)..(4): deoxy
  misc_feature (5)..(6): 2'-deoxy-2'-fluoro
  misc_feature (7)..(9): deoxy
  misc_feature (10)..(10): 2'-deoxy-2'-fluoro
  misc_feature (11)..(11): deoxy
  misc_feature (12)..(13): 2'-deoxy-2'-fluoro
  misc_feature (14)..(19): deoxy
  misc_feature (1)..(19): ribonucleotide unmodified or modified as described for this sequence
  misc_feature (21)..(21): 3'-3 attached terminal deoxyabasic moiety
ugcaccaaguacugaaagatt

SEQ ID NO: 2301 - DNA, 21 bp, Artificial Sequence
  Synthetic
  misc_feature (1)..(1): 5'-3 attached terminal deoxyabasic moiety
  misc_feature (1)..(2): 2'-deoxy-2'-fluoro
  misc_feature (3)..(3): deoxy
  misc_feature (4)..(4): 2'-deoxy-2'-fluoro
  misc_feature (5)..(5): deoxy
  misc_feature (6)..(7): 2'-deoxy-2'-fluoro
  misc_feature (8)..(10): deoxy
  misc_feature (11)..(11): 2'-deoxy-2'-fluoro
  misc_feature (12)..(12): deoxy
  misc_feature (13)..(14): 2'-deoxy-2'-fluoro
  misc_feature (15)..(19): deoxy
  misc_feature (1)..(19): ribonucleotide unmodified or modified as described for this sequence
  misc_feature (21)..(21): 3'-3 attached terminal deoxyabasic moiety
uugcaccaaguacugaaagtt

SEQ ID NO: 2302 - DNA, 21 bp, Artificial Sequence
  Synthetic
  misc_feature (1)..(1): 5'-3 attached terminal deoxyabasic moiety
  misc_feature (1)..(2): deoxy
  misc_feature (3)..(4): 2'-deoxy-2'-fluoro
  misc_feature (5)..(5): deoxy
  misc_feature (6)..(6): 2'-deoxy-2'-fluoro
  misc_feature (7)..(7): deoxy
  misc_feature (8)..(9): 2'-deoxy-2'-fluoro
  misc_feature (10)..(12): deoxy
  misc_feature (13)..(13): 2'-deoxy-2'-fluoro
  misc_feature (14)..(14): deoxy
  misc_feature (15)..(16): 2'-deoxy-2'-fluoro
  misc_feature (17)..(19): deoxy
  misc_feature (1)..(19): ribonucleotide unmodified or modified as described for this sequence
  misc_feature (21)..(21): 3'-3 attached terminal deoxyabasic moiety
aauugcaccaaguacugaatt

SEQ ID NO: 2303 - DNA, 21 bp, Artificial Sequence
  Synthetic
  misc_feature (1)..(1): 5'-3 attached terminal deoxyabasic moiety
  misc_feature (1)..(2): deoxy
  misc_feature (3)..(3): 2'-deoxy-2'-fluoro
  misc_feature (4)..(5): deoxy
  misc_feature (6)..(7): 2'-deoxy-2'-fluoro
  misc_feature (8)..(8): deoxy
  misc_feature (9)..(9): 2'-deoxy-2'-fluoro
  misc_feature (10)..(10): deoxy
  misc_feature (11)..(12): 2'-deoxy-2'-fluoro
  misc_feature (13)..(15): deoxy
  misc_feature (16)..(16): 2'-deoxy-2'-fluoro
  misc_feature (17)..(17): deoxy
  misc_feature (18)..(19): 2'-deoxy-2'-fluoro
  misc_feature (1)..(19): ribonucleotide unmodified or modified as described for this sequence
  misc_feature (21)..(21): 3'-3 attached terminal deoxyabasic moiety
gacaauugcaccaaguacutt

SEQ ID NO: 2304 - DNA, 21 bp, Artificial Sequence
  Synthetic
  misc_feature (1)..(1): 5'-3 attached terminal deoxyabasic moiety
  misc_feature (1)..(1): 2'-deoxy-2'-fluoro
  misc_feature (2)..(2): deoxy
  misc_feature (3)..(3): 2'-deoxy-2'-fluoro
  misc_feature (4)..(4): deoxy
  misc_feature (5)..(7): 2'-deoxy-2'-fluoro
  misc_feature (8)..(9): deoxy
  misc_feature (10)..(11): 2'-deoxy-2'-fluoro
  misc_feature (12)..(12): deoxy
  misc_feature (13)..(13): 2'-deoxy-2'-fluoro
  misc_feature (14)..(16): deoxy
  misc_feature (17)..(17): 2'-deoxy-2'-fluoro
  misc_feature (18)..(19): deoxy
  misc_feature (1)..(19): ribonucleotide unmodified or modified as described for this sequence
  misc_feature (21)..(21): 3'-3 attached terminal deoxyabasic moiety
cguacucaaccgugggugatt

SEQ ID NO: 2305 - DNA, 21 bp, Artificial Sequence
  Synthetic
  misc_feature (1)..(1): 5'-3 attached terminal deoxyabasic moiety
  misc_feature (1)..(1): 2'-deoxy-2'-fluoro
  misc_feature (2)..(2): deoxy
  misc_feature (3)..(3): 2'-deoxy-2'-fluoro
  misc_feature (4)..(5): deoxy
  misc_feature (6)..(7): 2'-deoxy-2'-fluoro
  misc_feature (8)..(8): deoxy
  misc_feature (9)..(9): 2'-deoxy-2'-fluoro
  misc_feature (10)..(10): deoxy
  misc_feature (11)..(13): 2'-deoxy-2'-fluoro
  misc_feature (14)..(15): deoxy
  misc_feature (16)..(17): 2'-deoxy-2'-fluoro
  misc_feature (18)..(18): deoxy
  misc_feature (19)..(19): 2'-deoxy-2'-fluoro
  misc_feature (1)..(19): ribonucleotide unmodified or modified as described for this sequence
  misc_feature (21)..(21): 3'-3 attached terminal deoxyabasic moiety
cgcaaucguacucaaccgutt

SEQ ID NO: 2306 - DNA, 21 bp, Artificial Sequence
  Synthetic
  misc_feature (1)..(1): 5'-3 attached terminal deoxyabasic moiety
  misc_feature (1)..(1): deoxy
  misc_feature (2)..(2): 2'-deoxy-2'-fluoro
  misc_feature (3)..(3): deoxy
  misc_feature (4)..(4): 2'-deoxy-2'-fluoro
  misc_feature (5)..(6): deoxy
  misc_feature (7)..(8): 2'-deoxy-2'-fluoro
  misc_feature (9)..(9): deoxy
  misc_feature (10)..(10): 2'-deoxy-2'-fluoro
  misc_feature (11)..(11): deoxy
  misc_feature (12)..(14): 2'-deoxy-2'-fluoro
  misc_feature (15)..(16): deoxy
  misc_feature (17)..(18): 2'-deoxy-2'-fluoro
  misc_feature (19)..(19): deoxy
  misc_feature (1)..(19): ribonucleotide unmodified or modified as described for this sequence
  misc_feature (21)..(21): 3'-3 attached terminal deoxyabasic moiety
acgcaaucguacucaaccgtt

SEQ ID NO: 2307 - DNA, 21 bp, Artificial Sequence
  Synthetic
  misc_feature (1)..(1): 5'-3 attached terminal deoxyabasic moiety
  misc_feature (1)..(1): 2'-deoxy-2'-fluoro
  misc_feature (2)..(3): deoxy
  misc_feature (4)..(4): 2'-deoxy-2'-fluoro
  misc_feature (5)..(5): deoxy
  misc_feature (6)..(6): 2'-deoxy-2'-fluoro
  misc_feature (7)..(8): deoxy
  misc_feature (9)..(10): 2'-deoxy-2'-fluoro
  misc_feature (11)..(11): deoxy
  misc_feature (12)..(12): 2'-deoxy-2'-fluoro
  misc_feature (13)..(13): deoxy
  misc_feature (14)..(16): 2'-deoxy-2'-fluoro
  misc_feature (17)..(18): deoxy
  misc_feature (19)..(19): 2'-deoxy-2'-fluoro
  misc_feature (1)..(19): ribonucleotide unmodified or modified as described for this sequence
  misc_feature (21)..(21): 3'-3 attached terminal deoxyabasic moiety
cgacgcaaucguacucaactt

SEQ ID NO: 2308 - DNA, 21 bp, Artificial Sequence
  Synthetic
  misc_feature (1)..(1): 5'-3 attached terminal deoxyabasic moiety
  misc_feature (1)..(1): deoxy
  misc_feature (2)..(2): 2'-deoxy-2'-fluoro
  misc_feature (3)..(4): deoxy
  misc_feature (5)..(5): 2'-deoxy-2'-fluoro
  misc_feature (6)..(6): deoxy
  misc_feature (7)..(7): 2'-deoxy-2'-fluoro
  misc_feature (8)..(9): deoxy
  misc_feature (10)..(11): 2'-deoxy-2'-fluoro
  misc_feature (12)..(12): deoxy
  misc_feature (13)..(13): 2'-deoxy-2'-fluoro
  misc_feature (14)..(14): deoxy
  misc_feature (15)..(17): 2'-deoxy-2'-fluoro
  misc_feature (18)..(19): deoxy
  misc_feature (1)..(19): ribonucleotide unmodified or modified as described for this sequence
  misc_feature (21)..(21): 3'-3 attached terminal deoxyabasic moiety
acgacgcaaucguacucaatt

SEQ ID NO: 2309 - DNA, 21 bp, Artificial Sequence
  Synthetic
  misc_feature (1)..(1): 5'-3 attached terminal deoxyabasic moiety
  misc_feature (1)..(1): 2'-deoxy-2'-fluoro
  misc_feature (2)..(2): deoxy
  misc_feature (3)..(3): 2'-deoxy-2'-fluoro
  misc_feature (4)..(4): deoxy
  misc_feature (5)..(6): 2'-deoxy-2'-fluoro
  misc_feature (7)..(11): deoxy
  misc_feature (12)..(13): 2'-deoxy-2'-fluoro
  misc_feature (14)..(15): deoxy
  misc_feature (15)..(16): 2'-deoxy-2'-fluoro
  misc_feature (18)..(18): deoxy
  misc_feature (19)..(19): 2'-deoxy-2'-fluoro
  misc_feature (1)..(19): ribonucleotide unmodified or modified as described for this sequence
  misc_feature (21)..(21): 3'-3 attached terminal deoxyabasic moiety
uacgucaagaaccaguuactt

SEQ ID NO: 2310 - DNA, 21 bp, Artificial Sequence
  Synthetic
  misc_feature (1)..(1): 5'-3 attached terminal deoxyabasic moiety
  misc_feature (1)..(1): deoxy
  misc_feature (2)..(2): 2'-deoxy-2'-fluoro
  misc_feature (3)..(3): deoxy
  misc_feature (4)..(4): 2'-deoxy-2'-fluoro
  misc_feature (5)..(5): deoxy
  misc_feature (6)..(7): 2'-deoxy-2'-fluoro
  misc_feature (8)..(12): deoxy
  misc_feature (13)..(14): 2'-deoxy-2'-fluoro
  misc_feature (15)..(16): deoxy
  misc_feature (17)..(18): 2'-deoxy-2'-fluoro
  misc_feature (19)..(19): deoxy
  misc_feature (1)..(19): ribonucleotide unmodified or modified as described for this sequence
  misc_feature (21)..(21): 3'-3 attached terminal deoxyabasic moiety
guacgucaagaaccaguuatt

SEQ ID NO: 2311 - DNA, 21 bp, Artificial Sequence
  Synthetic
  misc_feature (1)..(1): 5'-3 attached terminal deoxyabasic moiety
  misc_feature (1)..(3): deoxy
  misc_feature (4)..(4): 2'-deoxy-2'-fluoro
  misc_feature (5)..(5): deoxy
  misc_feature (6)..(6): 2'-deoxy-2'-fluoro
  misc_feature (7)..(7): deoxy
  misc_feature (8)..(9): 2'-deoxy-2'-fluoro
  misc_feature (10)..(14): deoxy
  misc_feature (15)..(16): 2'-deoxy-2'-fluoro
  misc_feature (17)..(18): deoxy
  misc_feature (19)..(19): 2'-deoxy-2'-fluoro
  misc_feature (1)..(19): ribonucleotide unmodified or modified as described for this sequence
  misc_feature (21)..(21): 3'-3 attached terminal deoxyabasic moiety
agguacgucaagaaccagutt

SEQ ID NO: 2312 - DNA, 21 bp, Artificial Sequence
  Synthetic
  misc_feature (1)..(1): 5'-3 attached terminal deoxyabasic moiety
  misc_feature (1)..(2): 2'-deoxy-2'-fluoro
  misc_feature (3)..(5): deoxy
  misc_feature (6)..(6): 2'-deoxy-2'-fluoro
  misc_feature (7)..(7): deoxy
  misc_feature (8)..(8): 2'-deoxy-2'-fluoro
  misc_feature (9)..(9): deoxy
  misc_feature (10)..(11): 2'-deoxy-2'-fluoro
  misc_feature (12)..(16): deoxy
  misc_feature (17)..(18): 2'-deoxy-2'-fluoro
  misc_feature (19)..(19): deoxy
  misc_feature (1)..(19): ribonucleotide unmodified or modified as described for this sequence
  misc_feature (21)..(21): 3'-3 attached terminal deoxyabasic moiety
ccagguacgucaagaaccatt

SEQ ID NO: 2313 - DNA, 21 bp, Artificial Sequence
  Synthetic
  misc_feature (1)..(1): 5'-3 attached terminal deoxyabasic moiety
  misc_feature (1)..(1): 2'-deoxy-2'-fluoro
  misc_feature (2)..(3): deoxy
  misc_feature (4)..(6): 2'-deoxy-2'-fluoro
  misc_feature (7)..(9): deoxy
  misc_feature (10)..(12): 2'-deoxy-2'-fluoro
  misc_feature (11)..(11): deoxy
  misc_feature (13)..(13): deoxy
  misc_feature (14)..(15): 2'-deoxy-2'-fluoro
  misc_feature (16)..(19): deoxy
  misc_feature (1)..(19): ribonucleotide unmodified or modified as described for this sequence
  misc_feature (21)..(21): 3'-3 attached terminal deoxyabasic moiety
caauccagguacgucaagatt

SEQ ID NO: 2314 - DNA, 21 bp, Artificial Sequence
  Synthetic
  misc_feature (1)..(1): 5'-3 attached terminal deoxyabasic moiety
  misc_feature (1)..(1): 2'-deoxy-2'-fluoro
  misc_feature (2)..(2): deoxy
  misc_feature (3)..(3): 2'-deoxy-2'-fluoro
  misc_feature (4)..(5): deoxy
  misc_feature (6)..(8): 2'-deoxy-2'-fluoro
  misc_feature (9)..(11): deoxy
  misc_feature (12)..(12): 2'-deoxy-2'-fluoro
  misc_feature (13)..(13): deoxy
  misc_feature (14)..(14): 2'-deoxy-2'-fluoro
  misc_feature (15)..(15): deoxy
  misc_feature (16)..(17): 2'-deoxy-2'-fluoro
  misc_feature (18)..(19): deoxy
  misc_feature (1)..(19): ribonucleotide unmodified or modified as described for this sequence
  misc_feature (21)..(21): 3'-3 attached terminal deoxyabasic moiety
uacaauccagguacgucaatt

SEQ ID NO: 2315 - DNA, 21 bp, Artificial Sequence
  Synthetic
  misc_feature (1)..(1): 2'-O-methyl
  misc_feature (2)..(3): 2'-deoxy-2'-fluoro
  misc_feature (4)..(5): 2'-O-methyl
  misc_feature (6)..(6): 2'-deoxy-2'-fluoro
  misc_feature (7)..(7): 2'-O-methyl
  misc_feature (8)..(9): 2'-deoxy-2'-fluoro
  misc_feature (10)..(15): 2'-O-methyl
  misc_feature (16)..(19): 2'-deoxy-2'-fluoro
  misc_feature (20)..(21): internucleotide phosphorothioate linkage
  misc_feature (1)..(19): ribonucleotide unmodified or modified as described for this sequence
acuggcgcugaaaaguuuctt

SEQ ID NO: 2316 - DNA, 21 bp, Artificial Sequence
  Synthetic
  misc_feature (1)..(2): 2'-deoxy-2'-fluoro
  misc_feature (3)..(6): 2'-O-methyl
  misc_feature (7)..(8): 2'-deoxy-2'-fluoro
  misc_feature (9)..(9): 2'-O-methyl
  misc_feature (10)..(11): 2'-deoxy-2'-fluoro
  misc_feature (12)..(15): 2'-O-methyl
  misc_feature (16)..(17): 2'-deoxy-2'-fluoro
  misc_feature (18)..(19): 2'-O-methyl
  misc_feature (20)..(21): internucleotide phosphorothioate linkage
  misc_feature (1)..(19): ribonucleotide unmodified or modified as described for this sequence
uuggagucguugaaguuggtt

SEQ ID NO: 2317 - DNA, 21 bp, Artificial Sequence
  Synthetic
  misc_feature (1)..(1): 2'-deoxy-2'-fluoro
  misc_feature (2)..(5): 2'-O-methyl
  misc_feature (6)..(7): 2'-deoxy-2'-fluoro
  misc_feature (8)..(8): 2'-O-methyl
  misc_feature (9)..(10): 2'-deoxy-2'-fluoro
  misc_feature (11)..(14): 2'-O-methyl
  misc_feature (15)..(16): 2'-deoxy-2'-fluoro
  misc_feature (17)..(19): 2'-O-methyl
  misc_feature (20)..(21): internucleotide phosphorothioate linkage
  misc_feature (1)..(19): ribonucleotide unmodified or modified as described for this sequence
uggagucguugaaguugggtt

SEQ ID NO: 2318 - DNA, 21 bp, Artificial Sequence
  Synthetic
  misc_feature (1)..(7): 2'-deoxy-2'-fluoro
  misc_feature (8)..(8): 2'-O-methyl
  misc_feature (9)..(13): 2'-deoxy-2'-fluoro
  misc_feature (14)..(17): 2'-O-methyl
  misc_feature (18)..(19): 2'-deoxy-2'-fluoro
  misc_feature (20)..(21): internucleotide phosphorothioate linkage
  misc_feature (1)..(19): ribonucleotide unmodified or modified as described for this sequence
cuuuuucacuuuuggaacutt

SEQ ID NO: 2319 - DNA, 21 bp, Artificial Sequence
  Synthetic
  misc_feature (1)..(1): 2'-O-methyl
  misc_feature (2)..(7): 2'-deoxy-2'-fluoro
  misc_feature (8)..(8): 2'-O-methyl
  misc_feature (9)..(11): 2'-deoxy-2'-fluoro
  misc_feature (12)..(12): 2'-O-methyl
  misc_feature (13)..(14): 2'-deoxy-2'-fluoro
  misc_feature (15)..(15): 2'-O-methyl
  misc_feature (16)..(16): 2'-deoxy-2'-fluoro
  misc_feature (17)..(17): 2'-O-methyl
  misc_feature (18)..(19): 2'-deoxy-2'-fluoro
  misc_feature (20)..(21): internucleotide phosphorothioate linkage
  misc_feature (1)..(19): ribonucleotide unmodified or modified as described for this sequence
gucccuuguccaccguguctt

SEQ ID NO: 2320 - DNA, 21 bp, Artificial Sequence
  Synthetic
  misc_feature (1)..(6): 2'-deoxy-2'-fluoro
  misc_feature (7)..(8): 2'-O-methyl
  misc_feature (9)..(9): 2'-deoxy-2'-fluoro
  misc_feature (10)..(10): 2'-O-methyl
  misc_feature (11)..(13): 2'-deoxy-2'-fluoro
  misc_feature (14)..(15): 2'-O-methyl
  misc_feature (16)..(16): 2'-deoxy-2'-fluoro
  misc_feature (17)..(17): 2'-O-methyl
  misc_feature (18)..(18): 2'-deoxy-2'-fluoro
  misc_feature (19)..(19): 2'-O-methyl
  misc_feature (20)..(21): internucleotide phosphorothioate linkage
  misc_feature (1)..(19): ribonucleotide unmodified or modified as described for this sequence
ucuuucaguacuuggugcatt

SEQ ID NO: 2321 - DNA, 21 bp, Artificial Sequence
  Synthetic
  misc_feature (1)..(5): 2'-deoxy-2'-fluoro
  misc_feature (6)..(7): 2'-O-methyl
  misc_feature (8)..(8): 2'-deoxy-2'-fluoro
  misc_feature (9)..(9): 2'-O-methyl
  misc_feature (10)..(12): 2'-deoxy-2'-fluoro
  misc_feature (13)..(14): 2'-O-methyl
  misc_feature (15)..(15): 2'-deoxy-2'-fluoro
  misc_feature (16)..(16): 2'-O-methyl
  misc_feature (17)..(17): 2'-deoxy-2'-fluoro
  misc_feature (18)..(19): 2'-O-methyl
  misc_feature (20)..(21): internucleotide phosphorothioate linkage
  misc_feature (1)..(19): ribonucleotide unmodified or modified as described for this sequence
cuuucaguacuuggugcaatt

SEQ ID NO: 2322 - DNA, 21 bp, Artificial Sequence
  Synthetic
  misc_feature (1)..(3): 2'-deoxy-2'-fluoro
  misc_feature (4)..(5): 2'-O-methyl
  misc_feature (6)..(6): 2'-deoxy-2'-fluoro
  misc_feature (7)..(7): 2'-O-methyl
  misc_feature (8)..(10): 2'-deoxy-2'-fluoro
  misc_feature (11)..(12): 2'-O-methyl
  misc_feature (13)..(13): 2'-deoxy-2'-fluoro
  misc_feature (14)..(14): 2'-O-methyl
  misc_feature (15)..(15): 2'-deoxy-2'-fluoro
  misc_feature (16)..(17): 2'-O-methyl
  misc_feature (18)..(19): 2'-deoxy-2'-fluoro
  misc_feature (20)..(21): internucleotide phosphorothioate linkage
  misc_feature (1)..(19): ribonucleotide unmodified or modified as described for this sequence
uucaguacuuggugcaauutt

SEQ ID NO: 2323 - DNA, 21 bp, Artificial Sequence
  Synthetic
  misc_feature (1)..(2): 2'-O-methyl
  misc_feature (3)..(3): 2'-deoxy-2'-fluoro
  misc_feature (4)..(4): 2'-O-methyl
  misc_feature (5)..(7): 2'-deoxy-2'-fluoro
  misc_feature (8)..(9): 2'-O-methyl
  misc_feature (10)..(10): 2'-deoxy-2'-fluoro
  misc_feature (11)..(11): 2'-O-methyl
  misc_feature (12)..(12): 2'-deoxy-2'-fluoro
  misc_feature (13)..(14): 2'-O-methyl
  misc_feature (15)..(16): 2'-deoxy-2'-fluoro
  misc_feature (17)..(17): 2'-O-methyl
  misc_feature (18)..(19): 2'-deoxy-2'-fluoro
  misc_feature (20)..(21): internucleotide phosphorothioate linkage
  misc_feature (1)..(19): ribonucleotide unmodified or modified as described for this sequence
aguacuuggugcaauuguctt

SEQ ID NO: 2324 - DNA, 21 bp, Artificial Sequence
  Synthetic
  misc_feature (1)..(2): 2'-deoxy-2'-fluoro
  misc_feature (3)..(3): 2'-O-methyl
  misc_feature (4)..(6): 2'-deoxy-2'-fluoro
  misc_feature (7)..(7): 2'-O-methyl
  misc_feature (8)..(8): 2'-deoxy-2'-fluoro
  misc_feature (9)..(10): 2'-O-methyl
  misc_feature (11)..(12): 2'-deoxy-2'-fluoro
  misc_feature (13)..(15): 2'-O-methyl
  misc_feature (16)..(16): 2'-deoxy-2'-fluoro
  misc_feature (17)..(17): 2'-O-methyl
  misc_feature (18)..(18): 2'-deoxy-2'-fluoro
  misc_feature (19)..(19): 2'-O-methyl
  misc_feature (20)..(21): internucleotide phosphorothioate linkage
  misc_feature (1)..(19): ribonucleotide unmodified or modified as described for this sequence
ucacccacgguugaguacgtt

SEQ ID NO: 2325 - DNA, 21 bp, Artificial Sequence
  Synthetic
  misc_feature (1)..(1): 2'-O-methyl
  misc_feature (2)..(2): 2'-deoxy-2'-fluoro
  misc_feature (3)..(4): 2'-O-methyl
  misc_feature (5)..(6): 2'-deoxy-2'-fluoro
  misc_feature (7)..(9): 2'-O-methyl
  misc_feature (10)..(10): 2'-deoxy-2'-fluoro
  misc_feature (11)..(11): 2'-O-methyl
  misc_feature (12)..(12): 2'-deoxy-2'-fluoro
  misc_feature (13)..(14): 2'-O-methyl
  misc_feature (15)..(16): 2'-deoxy-2'-fluoro
  misc_feature (17)..(17): 2'-O-methyl
  misc_feature (18)..(18): 2'-deoxy-2'-fluoro
  misc_feature (19)..(19): 2'-O-methyl
  misc_feature (20)..(21): internucleotide phosphorothioate linkage
  misc_feature (1)..(19): ribonucleotide unmodified or modified as described for this sequence
acgguugaguacgauugcgtt

SEQ ID NO: 2326 - DNA, 21 bp, Artificial Sequence
  Synthetic
  misc_feature (1)..(1): 2'-deoxy-2'-fluoro
  misc_feature (2)..(3): 2'-O-methyl
  misc_feature (4)..(5): 2'-deoxy-2'-fluoro
  misc_feature (6)..(8): 2'-O-methyl
  misc_feature (9)..(9): 2'-deoxy-2'-fluoro
  misc_feature (10)..(10): 2'-O-methyl
  misc_feature (11)..(11): 2'-deoxy-2'-fluoro
  misc_feature (12)..(13): 2'-O-methyl
  misc_feature (14)..(15): 2'-deoxy-2'-fluoro
  misc_feature (16)..(16): 2'-O-methyl
  misc_feature (17)..(17): 2'-deoxy-2'-fluoro
  misc_feature (18)..(18): 2'-O-methyl
  misc_feature (19)..(19): 2'-deoxy-2'-fluoro
  misc_feature (20)..(21): internucleotide phosphorothioate linkage
  misc_feature (1)..(19): ribonucleotide unmodified or modified as described for this sequence
cgguugaguacgauugcgutt

SEQ ID NO: 2327 - DNA, 21 bp, Artificial Sequence
  Synthetic
  misc_feature (1)..(1): 2'-O-methyl
  misc_feature (2)..(3): 2'-deoxy-2'-fluoro
  misc_feature (4)..(6): 2'-O-methyl
  misc_feature (7)..(7): 2'-deoxy-2'-fluoro
  misc_feature (8)..(8): 2'-O-methyl
  misc_feature (9)..(9): 2'-deoxy-2'-fluoro
  misc_feature (10)..(11): 2'-O-methyl
  misc_feature (12)..(13): 2'-deoxy-2'-fluoro
  misc_feature (14)..(14): 2'-O-methyl
  misc_feature (15)..(15): 2'-deoxy-2'-fluoro
  misc_feature (16)..(16): 2'-O-methyl
  misc_feature (17)..(18): 2'-deoxy-2'-fluoro
  misc_feature (19)..(19): 2'-O-methyl
  misc_feature (20)..(21): internucleotide phosphorothioate linkage
  misc_feature (1)..(19): ribonucleotide unmodified or modified as described for this sequence
guugaguacgauugcgucgtt

SEQ ID NO: 2328 - DNA, 21 bp, Artificial Sequence
  Synthetic
  misc_feature (1)..(2): 2'-deoxy-2'-fluoro
  misc_feature (3)..(5): 2'-O-methyl
  misc_feature (6)..(6): 2'-deoxy-2'-fluoro
  misc_feature (7)..(7): 2'-O-methyl
  misc_feature (8)..(8): 2'-deoxy-2'-fluoro
  misc_feature (9)..(10): 2'-O-methyl
  misc_feature (11)..(12): 2'-deoxy-2'-fluoro
  misc_feature (13)..(13): 2'-O-methyl
  misc_feature (14)..(14): 2'-deoxy-2'-fluoro
  misc_feature (15)..(15): 2'-O-methyl
  misc_feature (16)..(17): 2'-deoxy-2'-fluoro
  misc_feature (18)..(18): 2'-O-methyl
  misc_feature (19)..(19): 2'-deoxy-2'-fluoro
  misc_feature (20)..(21): internucleotide phosphorothioate linkage
  misc_feature (1)..(19): ribonucleotide unmodified or modified as described for this sequence
uugaguacgauugcgucgutt

SEQ ID NO: 2329 - DNA, 21 bp, Artificial Sequence
  Synthetic
  misc_feature (1)..(1): 2'-O-methyl
  misc_feature (2)..(2): 2'-deoxy-2'-fluoro
  misc_feature (3)..(4): 2'-O-methyl
  misc_feature (5)..(6): 2'-deoxy-2'-fluoro
  misc_feature (7)..(8): 2'-O-methyl
  misc_feature (9)..(13): 2'-deoxy-2'-fluoro
  misc_feature (14)..(15): 2'-O-methyl
  misc_feature (16)..(16): 2'-deoxy-2'-fluoro
  misc_feature (17)..(17): 2'-O-methyl
  misc_feature (18)..(18): 2'-deoxy-2'-fluoro
  misc_feature (19)..(19): 2'-O-methyl
  misc_feature (20)..(21): internucleotide phosphorothioate linkage
  misc_feature (1)..(19): ribonucleotide unmodified or modified as described for this sequence
guaacugguucuugacguatt

SEQ ID NO: 2330 - DNA, 21 bp, Artificial Sequence
  Synthetic
  misc_feature (1)..(1): 2'-deoxy-2'-fluoro
  misc_feature (2)..(3): 2'-O-methyl
  misc_feature (4)..(5): 2'-deoxy-2'-fluoro
  misc_feature (6)..(7): 2'-O-methyl
  misc_feature (8)..(12): 2'-deoxy-2'-fluoro
  misc_feature (13)..(14): 2'-O-methyl
  misc_feature (15)..(15): 2'-deoxy-2'-fluoro
  misc_feature (16)..(16): 2'-O-methyl
  misc_feature (17)..(17): 2'-deoxy-2'-fluoro
  misc_feature (18)..(18): 2'-O-methyl
  misc_feature (19)..(19): 2'-deoxy-2'-fluoro
  misc_feature (20)..(21): internucleotide phosphorothioate linkage
  misc_feature (1)..(19): ribonucleotide unmodified or modified as described for this sequence
uaacugguucuugacguactt

SEQ ID NO: 2331 - DNA, 21 bp, Artificial Sequence
  Synthetic
  misc_feature (1)..(1): 2'-O-methyl
  misc_feature (2)..(3): 2'-deoxy-2'-fluoro
  misc_feature (4)..(5): 2'-O-methyl
  misc_feature (6)..(10): 2'-deoxy-2'-fluoro
  misc_feature (11)..(12): 2'-O-methyl
  misc_feature (13)..(13): 2'-deoxy-2'-fluoro
  misc_feature (14)..(14): 2'-O-methyl
  misc_feature (15)..(15): 2'-deoxy-2'-fluoro
  misc_feature (16)..(16): 2'-O-methyl
  misc_feature (17)..(19): 2'-deoxy-2'-fluoro
  misc_feature (20)..(21): internucleotide phosphorothioate linkage
acugguucuugacguaccutt

SEQ ID NO: 2332 - DNA, 21 bp, Artificial Sequence
  Synthetic
  misc_feature (1)..(1): 2'-deoxy-2'-fluoro
  misc_feature (2)..(3): 2'-O-methyl
  misc_feature (4)..(8): 2'-deoxy-2'-fluoro
  misc_feature (9)..(10): 2'-O-methyl
  misc_feature (11)..(11): 2'-deoxy-2'-fluoro
  misc_feature (12)..(12): 2'-O-methyl
  misc_feature (13)..(13): 2'-deoxy-2'-fluoro
  misc_feature (14)..(14): 2'-O-methyl
  misc_feature (15)..(17): 2'-deoxy-2'-fluoro
  misc_feature (18)..(19): 2'-O-methyl
  misc_feature (20)..(21): internucleotide phosphorothioate linkage
  misc_feature (1)..(19): ribonucleotide unmodified or modified as described for this sequence
ugguucuugacguaccuggtt

SEQ ID NO: 2333 - DNA, 21 bp, Artificial Sequence
  Synthetic
  misc_feature (1)..(4): 2'-deoxy-2'-fluoro
  misc_feature (5)..(6): 2'-O-methyl
  misc_feature (7)..(7): 2'-deoxy-2'-fluoro
  misc_feature (8)..(8): 2'-O-methyl
  misc_feature (9)..(9): 2'-deoxy-2'-fluoro
  misc_feature (10)..(10): 2'-O-methyl
  misc_feature (11)..(13): 2'-deoxy-2'-fluoro
  misc_feature (14)..(16): 2'-O-methyl
  misc_feature (17)..(18): 2'-deoxy-2'-fluoro
  misc_feature (19)..(19): 2'-O-methyl
  misc_feature (20)..(21): internucleotide phosphorothioate linkage
ucuugacguaccuggauugtt

SEQ ID NO: 2334 - DNA, 21 bp, Artificial Sequence
  Synthetic
  misc_feature (1)..(2): 2'-deoxy-2'-fluoro
  misc_feature (3)..(4): 2'-O-methyl
  misc_feature (5)..(5): 2'-deoxy-2'-fluoro
  misc_feature (6)..(6): 2'-O-methyl
  misc_feature (7)..(7): 2'-deoxy-2'-fluoro
  misc_feature (8)..(8): 2'-O-methyl
  misc_feature (9)..(11): 2'-deoxy-2'-fluoro
  misc_feature (12)..(14): 2'-O-methyl
  misc_feature (15)..(16): 2'-deoxy-2'-fluoro
  misc_feature (17)..(17): 2'-O-methyl
  misc_feature (18)..(18): 2'-deoxy-2'-fluoro
  misc_feature (19)..(19): 2'-O-methyl
  misc_feature (20)..(21): internucleotide phosphorothioate linkage
uugacguaccuggauuguatt

SEQ ID NO: 2335 - DNA, 21 bp, Artificial Sequence
  Synthetic
  misc_feature (1)..(1): 5'-3 attached terminal deoxyabasic moiety
  misc_feature (1)..(19): ribonucleotide unmodified or modified as described for this sequence
  misc_feature (21)..(21): 3'-3 attached terminal deoxyabasic moiety
ugcaccaaguacugaaagatt

SEQ ID NO: 2336 - DNA, 21 bp, Artificial Sequence
  Synthetic
  misc_feature (1)..(1): 5'-3 attached terminal deoxyabasic moiety
  misc_feature (1)..(19): ribonucleotide unmodified or modified as described for this sequence
  misc_feature (21)..(21): 3'-3 attached terminal deoxyabasic moiety
aauugcaccaaguacugaatt

SEQ ID NO: 2337 - DNA, 21 bp, Artificial Sequence
  Synthetic
  misc_feature (20)..(21): internucleotide phosphorothioate linkage
  misc_feature (1)..(19): ribonucleotide unmodified or modified as described for this sequence
ucuuucaguacuuggugcatt

SEQ ID NO: 2338 - DNA, 21 bp, Artificial Sequence
  Synthetic
  misc_feature (20)..(21): internucleotide phosphorothioate linkage
  misc_feature (1)..(19): ribonucleotide unmodified or modified as described for this sequence
uucaguacuuggugcaauutt

SEQ ID NO: 2339 - DNA, 21 bp, Artificial Sequence
  Synthetic
  misc_feature (1)..(1): 5'-3 attached terminal deoxyabasic moiety, inverted abasic, inverted nucleotide or other terminal cap that is optionally present
  misc_feature (21)..(21): 3'-3 attached terminal deoxyabasic moiety, inverted abasic, inverted nucleotide or other terminal cap that is optionally present
  misc_feature (1)..(19): any ribonucleotide unmodified or modified as described for this sequence
  misc_feature (20)..(21): n stands for any nucleotide
nnnnnnnnnnnnnnnnnnnnn

SEQ ID NO: 2340 - DNA, 21 bp, Artificial Sequence
  Synthetic
  misc_feature (20)..(20): Phosphorothioate or Phosphorodithioate 3'-Internucleotide Linkage (optionally absent)
  misc_feature (1)..(19): n is any ribonucleotide unmodified or modified as described for this sequence
  misc_feature (20)..(21): n stands for any nucleotide
  misc_feature (21)..(21): 3'-3 attached terminal glyceryl moiety or inverted deoxyabasic (optionally present)
nnnnnnnnnnnnnnnnnnnnn

SEQ ID NO: 2341 - DNA, 21 bp, Artificial Sequence
  Synthetic
  misc_feature (1)..(19): n stands for any ribonucleotide wherein any pyrimidine nucleotide present is 2'-Fluoro and any purine nucleotide present is 2'-O-methyl
  misc_feature (20)..(20): Phosphorothioate or Phosphorodithioate 3'-Internucleotide Linkage (optionally absent)
  misc_feature (20)..(21): n stands for any nucleotide
nnnnnnnnnnnnnnnnnnnnn

SEQ ID NO: 2342 - DNA, 21 bp, Artificial Sequence
  Synthetic
  misc_feature (1)..(19): n stands for any ribonucleotide wherein any pyrimidine nucleotide present is 2'-Fluoro and any purine nucleotide present is 2'-O-methyl
  misc_feature (20)..(20): Phosphorothioate or Phosphorodithioate 3'-Internucleotide Linkage (optionally absent)
  misc_feature (20)..(21): n stands for any nucleotide
  misc_feature (21)..(21): 3'-3 attached terminal glyceryl moiety or inverted deoxyabasic (optionally present)
nnnnnnnnnnnnnnnnnnnnn

SEQ ID NO: 2343 - DNA, 21 bp, Artificial Sequence
  Synthetic
  misc_feature (1)..(19): n stands for any ribonucleotide wherein any pyrimidine nucleotide present is 2'-O-methyl or 2'-Fluoro
  misc_feature (20)..(21): n stands for any nucleotide
  misc_feature (1)..(1): 5'-3 attached terminal deoxyabasic moiety, inverted abasic, inverted nucleotide or other terminal cap that is optionally present
  misc_feature (21)..(21): 3'-3 attached terminal deoxyabasic moiety, inverted abasic, inverted nucleotide or other terminal cap that is optionally present
nnnnnnnnnnnnnnnnnnnnn

SEQ ID NO: 2344 - DNA, 21 bp, Artificial Sequence
  Synthetic
  misc_feature (1)..(19): n stands for any ribonucleotide wherein any pyrimidine nucleotide present is 2'-Fluoro
  misc_feature (20)..(20): Phosphorothioate or Phosphorodithioate 3'-Internucleotide Linkage (optionally absent)
  misc_feature (20)..(21): n stands for any nucleotide
  misc_feature (21)..(21): attached terminal glyceryl moiety or 3'-3 attached inverted deoxyabasic (optionally present)
nnnnnnnnnnnnnnnnnnnnn

SEQ ID NO: 2345 - DNA, 21 bp, Artificial Sequence
  Synthetic
  misc_feature (1)..(19): n stands for any ribonucleotide wherein any pyrimidine nucleotide present is 2'-Fluoro and any purine nucleotide present is 2'-Deoxy
  misc_feature (20)..(21): n stands for any nucleotide
  misc_feature (1)..(1): 5'-3 attached terminal deoxyabasic moiety, inverted abasic, inverted nucleotide or other terminal cap that is optionally present
  misc_feature (21)..(21): attached terminal deoxyabasic moiety, 3'-3 attached inverted abasic, 3'-3 attached inverted nucleotide or other terminal cap that is optionally present
nnnnnnnnnnnnnnnnnnnnn

SEQ ID NO: 2346 - DNA, 21 bp, Artificial Sequence
  Synthetic
  misc_feature (1)..(19): n stands for any ribonucleotide wherein any pyrimidine nucleotide present is 2'-Fluoro and any purine nucleotide present is 2'-Deoxy
  misc_feature (20)..(20): Phosphorothioate or Phosphorodithioate 3'-Internucleotide Linkage (optionally absent)
  misc_feature (20)..(21): n stands for any nucleotide
  misc_feature (21)..(21): attached terminal glyceryl moiety or 3'-3 attached inverted deoxyabasic (optionally present)
nnnnnnnnnnnnnnnnnnnnn

SEQ ID NO: 2347 - DNA, 21 bp, Artificial Sequence
  Synthetic
  misc_feature (1)..(1): 5'-3 attached terminal deoxyabasic moiety
  misc_feature (21)..(21): 3'-3 attached terminal deoxyabasic moiety
  misc_feature (1)..(19): ribonucleotide unmodified or modified as described for this sequence
gccgcuucgagcggaugcutt

SEQ ID NO: 2348 - DNA, 21 bp, Artificial Sequence
  Synthetic
  misc_feature (20)..(20): Phosphorothioate 3'-Internucleotide Linkage
  misc_feature (1)..(19): ribonucleotide unmodified or modified as described for this sequence
  misc_feature (21)..(21): 3'-3 attached terminal glyceryl moiety
agcauccgcucgaagcggctt

SEQ ID NO: 2349 - DNA, 21 bp, Artificial Sequence
  Synthetic
  misc_feature (1)..(1): 2'-O-methyl
  misc_feature (4)..(4): 2'-O-Methyl
  misc_feature (9)..(11): 2'-O-Methyl
  misc_feature (13)..(15): 2'-O-Methyl
  misc_feature (17)..(17): 2'-O-Methyl
  misc_feature (2)..(3): 2'-deoxy-2'-fluoro
  misc_feature (5)..(8): 2'-deoxy-2'-fluoro
  misc_feature (12)..(12): 2'-deoxy-2'-fluoro
  misc_feature (16)..(16): 2'-deoxy-2'-fluoro
  misc_feature (18)..(19): 2'-deoxy-2'-fluoro
  misc_feature (18)..(18): 2'-deoxy-2'-fluoro
  misc_feature (1)..(19): ribonucleotide unmodified or modified as described for this sequence
gccgcuucgagcggaugcutt

SEQ ID NO: 2350 - DNA, 21 bp, Artificial Sequence
  Synthetic
  misc_feature (1)..(2): 2'-O-Methyl
  misc_feature (4)..(4): 2'-O-Methyl
  misc_feature (8)..(8): 2'-O-Methyl
  misc_feature (12)..(15): 2'-O-Methyl
  misc_feature (17)..(18): 2'-O-Methyl
  misc_feature (3)..(3): 2'-deoxy-2'-fluoro
  misc_feature (5)..(7): 2'-deoxy-2'-fluoro
  misc_feature (9)..(11): 2'-deoxy-2'-fluoro
  misc_feature (16)..(16): 2'-deoxy-2'-fluoro
  misc_feature (19)..(19): 2'-deoxy-2'-fluoro
  misc_feature (1)..(19): ribonucleotide unmodified or modified as described for this sequence
  misc_feature (20)..(20): Phosphorothioate 3'-Internucleotide Linkage
  misc_feature (21)..(21): 3'-3 attached terminal glyceryl moiety
agcauccgcucgaagcggctt

SEQ ID NO: 2351 - DNA, 21 bp, Artificial Sequence
  Synthetic
  misc_feature (2)..(3): 2'-O-Methyl or 2'-deoxy-2'-fluoro
  misc_feature (5)..(8): 2'-O-Methyl or 2'-deoxy-2'-fluoro
  misc_feature (12)..(12): 2'-O-Methyl or 2'-deoxy-2'-fluoro
  misc_feature (15)..(16): 2'-O-Methyl or 2'-deoxy-2'-fluoro
  misc_feature (18)..(19): 2'-O-Methyl or 2'-deoxy-2'-fluoro
  misc_feature (1)..(1): 5'-3 attached terminal deoxyabasic moiety
  misc_feature (21)..(21): 3'-3 attached terminal deoxyabasic moiety
  misc_feature (1)..(19): ribonucleotide unmodified or modified as described for this sequence
gccgcuucgagcggaugcutt

SEQ ID NO: 2352 - DNA, 21 bp, Artificial Sequence
  Synthetic
  misc_feature (3)..(3): 2'-deoxy-2'-fluoro
  misc_feature (5)..(7): 2'-deoxy-2'-fluoro
  misc_feature (9)..(11): 2'-deoxy-2'-fluoro
  misc_feature (16)..(16): 2'-deoxy-2'-fluoro
  misc_feature (19)..(19): 2'-deoxy-2'-fluoro
  misc_feature (20)..(20): Phosphorothioate 3'-Internucleotide Linkage
  misc_feature (1)..(19): ribonucleotide unmodified or modified as described for this sequence
  misc_feature (21)..(21): 3'-3 attached terminal glyceryl moiety
agcauccgcucgaagcggctt

SEQ ID NO: 2353 - DNA, 21 bp, Artificial Sequence
  Synthetic
  misc_feature (1)..(1): 2'-deoxy
  misc_feature (4)..(4): 2'-deoxy
  misc_feature (9)..(11): 2'-deoxy
  misc_feature (13)..(14): 2'-deoxy
  misc_feature (17)..(17): 2'-deoxy
  misc_feature (2)..(3): 2'-deoxy-2'-fluoro
  misc_feature (5)..(8): 2'-deoxy-2'-fluoro
  misc_feature (12)..(12): 2'-deoxy-2'-fluoro
  misc_feature (15)..(16): 2'-deoxy-2'-fluoro
  misc_feature (18)..(19): 2'-deoxy-2'-fluoro
  misc_feature (1)..(1): 5'-3 attached terminal deoxyabasic moiety
  misc_feature (21)..(21): 3'-3 attached terminal deoxyabasic moiety
  misc_feature (1)..(19): ribonucleotide unmodified or modified as described for this sequence
gccgcuucgagcggaugcutt

SEQ ID NO: 2354 - DNA, 21 bp, Artificial Sequence
  Synthetic
  misc_feature (2)..(3): 2'-deoxy-2'-fluoro
  misc_feature (5)..(8): 2'-deoxy-2'-fluoro
  misc_feature (12)..(12): 2'-deoxy-2'-fluoro
  misc_feature (16)..(16): 2'-deoxy-2'-fluoro
  misc_feature (18)..(19): 2'-deoxy-2'-fluoro
  misc_feature (1)..(1): 5'-3 attached terminal deoxyabasic moiety
  misc_feature (21)..(21): 3'-3 attached terminal deoxyabasic moiety
  misc_feature (1)..(19): ribonucleotide unmodified or modified as described for this sequence
gccgcuucgagcggaugcutt

SEQ ID NO: 2355 - DNA, 21 bp, Artificial Sequence
  Synthetic
  misc_feature (1)..(2): 2'-deoxy
  misc_feature (4)..(4): 2'-deoxy
  misc_feature (8)..(8): 2'-deoxy
  misc_feature (12)..(15): 2'-deoxy
  misc_feature (17)..(18): 2'-deoxy
  misc_feature (3)..(3): 2'-deoxy-2'-fluoro
  misc_feature (5)..(7): 2'-deoxy-2'-fluoro
  misc_feature (9)..(11): 2'-deoxy-2'-fluoro
  misc_feature (16)..(16): 2'-deoxy-2'-fluoro
  misc_feature (19)..(19): 2'-deoxy-2'-fluoro
  misc_feature (20)..(20): Phosphorothioate 3'-Internucleotide Linkage
  misc_feature (1)..(19): ribonucleotide unmodified or modified as described for this sequence
  misc_feature (21)..(21): 3'-3 attached terminal glyceryl moiety
agcauccgcucgaagcggctt

SEQ ID NO: 2356 - RNA, 14 nt, Artificial Sequence
  Description of Artificial Sequence:  Target Sequence
auauaucuauuucg

SEQ ID NO: 2357 - RNA, 14 nt, Artificial Sequence
  Synthetic construct
auauaucuauuucg

SEQ ID NO: 2358 - RNA, 14 nt, Artificial Sequence
  Synthetic construct
cgaaauaguauaua

SEQ ID NO: 2359 - RNA, 22 nt, Artificial Sequence
  Synthetic appended target/complement
cgaaauaguauauacuauuucg

SEQ ID NO: 2360 - DNA, 24 bp, Artificial Sequence
  Synthetic duplex forming oligonucleotide
  misc_feature (1)..(22): ribonucleotide unmodified or modified as described for this sequence
cgaaauaguauauacuauuucgtt

SEQ ID NO: 2361 - RNA, 3757 nt, Homo Sapiens
ggaaccgcgaccacuggagccuuagcgggcgcagcagcuggaacgggaguacugcgacgcagcccggagucggccuuguaggggcgaaggugcagggagaucgcggcgggcgcagucuugagcgccggagcgcgucccugcccuuagcggggcuugccccagucgcaggggcacauccagccgcugcggcugacagcagccgcgcgcgcgggagucugcggggucgcggcagccgcaccugcgcgggcgaccagcgcaagguccccgcccggcugggcgggcagcaagggccggggagagggugcgggugcaggcgggggccccacagggccaccuucuugcccggcggcugccgcuggaaaaugucucaggagaggcccacguucuaccggcaggagcugaacaagacaaucugggaggugcccgagcguuaccagaaccugucuccagugggcucuggcgccuauggcucugugugugcugcuuuugacacaaaaacgggguuacguguggcagugaagaagcucuccagaccauuucaguccaucauucaugcgaaaagaaccuacagagaacugcgguuacuuaaacauaugaaacaugaaaaugugauuggucuguuggacguuuuuacaccugcaaggucucuggaggaauucaaugauguguaucuggugacccaucucaugggggcagaucugaacaacauugugaaaugucagaagcuuacagaugaccauguucaguuccuuaucuaccaaauucuccgaggucuaaaguauauacauucagcugacauaauucacagggaccuaaaaccuaguaaucuagcugugaaugaagacugugagcugaagauucuggauuuuggacuggcucggcacacagaugaugaaaugacaggcuacguggccacuaggugguacagggcuccugagaucaugcugaacuggaugcauuacaaccagacaguugauauuuggucagugggaugcauaauggccgagcuguugacuggaagaacauuguuuccugguacagaccauauuaaccagcuucagcagauuaugcgucugacaggaacaccccccgcuuaucucauuaacaggaugccaagccaugaggcaagaaacuauauucagucuuugacucagaugccgaagaugaacuuugcgaauguauuuauuggugccaauccccuggcugucgacuugcuggagaagaugcuuguauuggacucagauaagagaauuacagcggcccaagcccuugcacaugccuacuuugcucaguaccacgauccugaugaugaaccaguggccgauccuuaugaucaguccuuugaaagcagggaccuccuuauagaugaguggaaaagccugaccuaugaugaagucaucagcuuugugccaccaccccuugaccaagaagagauggaguccugagcaccugguuucuguucuguugaucccacuucacugugaggggaaggccuuuucacgggaacucuccaaauauuauucaagugccucuuguugcagagauuuccuccaugguggaagggggugugcgugcgugugcgugcguguuagugugugugcaugugugugucugucuuugugggaggguaagacaauaugaacaaacuaugaucacagugacuuuacaggagguuguggaugcuccagggcagccuccaccuugcucuucuuucugagaguuggcucaggcagacaagagcugcuguccuuuuaggaauauguucaaugcaaaguaaaaaaauaugaauuguccccaaucccggucaugcuuuugccacuuuggcuucuccugugaccccaccuugacgguggggcguagacuugacaacaucccacaguggcacggagagaaggcccauaccuucugguugcuucagaccugacaccgucccucagugauacguacagccaaaaaggaccaacuggcuucugugcacuagccugugauuaacuugcuuaguaugguucucagaucuugacaguauauuugaaacuguaaauauguuugugccuuaaaaggagagaagaaaguguagauaguuaaaagacugcagcugcugaaguucugagccgggcaagucgagagggcuguuggacagcugcuugugggcccggaguaaucaggcagccuucauaggcggucaugugugcaugugagcacaugcguauaugugcgucucucuuucucccucacccccagguguugccauuucucugcuuacccuucaccuuuggugcagagguuucuugaauaucugccccaguagucagaagcagguucuugaugucauguacuuccuguguacucuuuauuucuagcagagugaggauguguuuugcacgucuugcuauuugagcaugcacagcugcuuguccugcucucuucaggaggcccuggugucaggcagguuugccagugaagacuucuuggguaguuuagaucccaugucaccucagcugauauuauggcaagugauaucaccucucuucagccccuagugcuauucuguguugaacacaauugauacuucaggugcuuuugaugugaaaaucaugaaaagaggaacagguggauguauagcauuuuuauucaugccaucuguuuucaaccaacuauuuuugaggaauuaucaugggaaaagaccagggcuuuucccaggaauaucccaaacuucggaaacaaguuauucucuucacucccaauaacuaaugcuaagaaaugcugaaaaucaaaguaaaaaauuaaagcccauaaggccagaaacuccuuuugcugucuuucucuaaauaugauuacuuuaaaauaaaaaaguaacaaggugucuuuuccacuccuauggaaaagggucuucuuggcagcuuaacauugacuucuugguuuggggagaaauaaauuuuguuucagaauuuuguauauuguaggaaucccuuugagaaugugauuccuuuugauggggagaaagggcaaauuauuuuaauauuuuguauuuucaacuuuauaaagauaaaauauccucagggguggagaagugucguuuucauaacuugcugaauuucaggcauuuuguucuacaugaggacucauauauuuaagccuuuuguguaauaagaaaguauaaagucacuuccaguguuggcugugugacagaaucuuguauuugggccaagguguuuccauuucucaaucagugcagugauacauguacuccagagggacaggguggacccccugagucaacuggagcaagaaggaaggaggcagacugauggcgauucccucucacccgggacucucccccuuucaaggaaagugaaccuuuaaaguaaaggccucaucuccuuuauugcaguucaaauccucaccauccacagcaagaugaauuuuaucagccauguuugguuguaaaugcucgugugauuuccuacagaaauacugcucugaauauuuuguaauaaaggucuuugcacaugugaccacauacguguuaggaggcugcaugcucuggaagccuggacucuaagcuggagcucuuggaagagcucuucgguuucugagcauaaugcucccaucuccugauuucucugaacagaaaacaaaagagagaaugagggaaauugcuauuuuauuuguauucaugaacuuggcuguaaucaguuaugccguauaggaugucagacaauaccacugguuaaaauaaagccuauuuuucaaauuu

What we claim is:

1. A chemically modified nucleic acid molecule, wherein:
(a) the nucleic acid molecule comprises a sense strand and a separate antisense strand, each strand having one or more pyrimidine nucleotides and one or more purine nucleotides;
(b) each strand of the nucleic acid molecule is independently 18 to 27 nucleotides in length;
(c) an 18 to 27 nucleotide sequence of the antisense strand is complementary to a human p38 RNA sequence comprising SEQ ID NO: 2361;
(d) an 18 to 27 nucleotide sequence of the sense strand is complementary to the antisense strand and comprises an 18 to 27 nucleotide sequence of the human p38 RNA sequence; and
(e) 50 percent or more of the nucleotides in at least one strand comprise a 2-sugar modification, wherein the 2′-sugar modification of any of the pyrimidine nucleotides differs from the 2′-sugar modification of any of the purine nucleotides.

2. The nucleic acid molecule of claim 1, wherein 50 percent or more of the nucleotides in each strand comprise a 2′-sugar modification.

3. The nucleic acid molecule of claim 1, wherein the 2′-sugar modification is selected from the group consisting of 2′-deoxy-2′-fluoro, 2′-O-methyl, and 2′-deoxy.

4. The nucleic acid of claim 3, wherein the 2′-deoxy-2′-fluoro sugar modification is a pyrimidine modification.

5. The nucleic acid of claim 3, wherein the 2′-deoxy sugar modification is a pyrimidine modification.

6. The nucleic acid of claim 3, wherein the 2′-O-methyl sugar modification is a pyrimidine modification.

7. The nucleic acid molecule of claim 4, wherein said pyrimidine modification is in the sense strand, the antisense strand, or both the sense strand and antisense strand.

8. The nucleic acid molecule of claim 6, wherein said pyrimidine modification is in the sense strand, the antisense strand, or both the sense strand and antisense strand.

9. The nucleic acid molecule of claim 3, wherein the 2′-deoxy sugar modification is a purine modification.

10. The nucleic acid molecule of claim 3, wherein the 2′-O-methyl sugar modification is a purine modification.

11. The nucleic acid molecule of claim 9, wherein the purine modification is in the sense strand.

12. The nucleic acid molecule of claim 10, wherein the purine modification is in the antisense strand.

13. The nucleic acid molecule of claim 1, wherein the nucleic acid molecule comprises ribonucleotides.

14. The nucleic acid molecule of claim 1, wherein the sense strand includes a terminal cap moiety at the 5′-end, the 3′-end, or both of the 5′- and 3′-ends.

15. The nucleic acid molecule of claim 14, wherein the terminal cap moiety is an inverted deoxy abasic moiety.

16. The nucleic acid molecule of claim 1, wherein said nucleic acid molecule includes one or more phosphorothioate internucleotide linkages.

17. The nucleic acid molecule of claim 16, wherein one of the phosphorothioate internucleotide linkages is at the 3′-end of the antisense strand.

18. The nucleic acid molecule of claim 1, wherein the 5′-end of the antisense strand includes a terminal phosphate group.

19. The nucleic acid molecule of claim 1, wherein the sense strand, the antisense strand, or both the sense strand and the antisense strand include a 3′-overhang.

20. A composition comprising the nucleic acid molecule of claim 1, in a pharmaceutically acceptable carrier or diluent.
